(19) United States
(12) Patent Application Publication
(10) Pub. No.: US 2024/0002543 A1
(43) Pub. Date: Jan. 4, 2024

(54) MULTIFUNCTIONAL MOLECULES THAT BIND TO CALRETICULIN AND USES THEREOF

(71) Applicant: Marengo Therapeutics, Inc., Cambridge, MA (US)

(72) Inventors: Andreas Loew, Boston, MA (US); Madan Katragadda, Acton, MA (US); Saeyoung Park, Cambridge, MA (US); Roya Servattalab, Brighton, MA (US)

(21) Appl. No.: 18/173,995

(22) Filed: Feb. 24, 2023

Related U.S. Application Data
(63) Continuation of application No. PCT/US2021/047571, filed on Aug. 25, 2021.
(60) Provisional application No. 63/070,769, filed on Aug. 26, 2020.

(51) Int. Cl. C07K 16/46; A61P 35/00

(52) U.S. Cl. CPC C07K 16/468; A61P 35/00; C07K 2317/52; C07K 2317/565; C07K 2317/31

(57) ABSTRACT

Multifunctional molecules that include i) an antigen binding domain that binds to a calreticulin protein; and one, two or all of: (ii) an immune cell engager (e.g., chosen from an NK cell engager, a T cell engager, a B cell engager, a dendritic cell engager, or a macrophage cell engager); (iii) a cytokine molecule; and/or (iv) a stromal modifying moiety are disclosed. Additionally disclosed are nucleic acids encoding the same, methods of producing the aforesaid molecules, and methods of treating a cancer using the aforesaid molecules.

### RELATED APPLICATIONS

[0001] This application is a continuation of International Patent Application No., PCT/US2021/047571 filed Aug. 25, 2021 which claims the benefit of U.S. Provisional Patent Application No. 63/070,769 filed on Aug. 26, 2020, the entire contents of which are hereby incorporated by reference.

### REFERENCE TO A SEQUENCE LISTING XML

[0002] The instant application contains a Sequence Listing which has been submitted electronically in XML format and is hereby incorporated by reference in its entirety. Said XML file, created on Feb. 16, 2023, is named 53676-740_301_SL.xml and is 2,710,544 bytes in size.

### BACKGROUND

[0003] Myeloproliferative neoplasms (MPNs) are a group of conditions that cause blood cells to grow abnormally in the bone marrow. Common myeloproliferative neoplasms include primary or idiopathic myelofibrosis (MF), essential thrombocytosis (ET), polycythemia vera (PV), and chronic myelogenous leukemia (CML). Primary myelofibrosis is a chronic blood cancer in which excessive scar tissue forms in the bone marrow and impairs its ability to produce normal blood cells. Given the ongoing need for improved treatment of myeloproliferative neoplasms such as myelofibrosis, new compositions and treatments targeting myeloproliferative neoplasms are highly desirable.

### SUMMARY OF THE INVENTION

[0004] Provided herein, inter alia, in an aspect, is a composition comprising a polypeptide molecule comprising: (i) a first antigen binding domain that binds to a calreticulin protein (e.g., a wild-type or mutant calreticulin protein), e.g., a calreticulin-targeting antigen binding domain disclosed in any one of Table 4, Table 5, Table 6, Table 24, Table 25, Table 16, Table 17, Table 18, or Table 19, and (ii) a second antigen binding domain that binds to TCRβV, e.g., an anti-TCRβV antigen binding domain disclosed in any one of Table 30, Table 31, Table 32, Table 10, Table 11, Table 12, or Table 13, or a second antigen binding domain that binds to NKp30, e.g., an anti-NKp30 antigen binding domain disclosed in Table 7, Table 8, Table 35, Table 36, Table 9, Table 10, or Table 34.

[0005] In some embodiments, the polypeptide molecule is a multifunctional polypeptide molecule.

[0006] In some embodiments, the polypeptide molecule is a multispecific polypeptide molecule.

[0007] In some embodiments, the second antigen binding domain binds to TCRβV.

[0008] In some embodiments, the second antigen binding domain activates a T cell or the second antigen binding domain does not activate a T cell.

[0009] In some embodiments, the second antigen binding domain binds to TCRβV12 or TCRβV6 (e.g., comprising the amino acid sequence of SEQ ID NO: 1044).

[0010] In some embodiments, the second antigen binding domain comprises one or more amino acid sequences as listed in Table 30, Table 31, Table 32, Table 10, Table 11, Table 12, or Table 13.

[0011] In some embodiments, the second antigen binding domain comprises: (a) a heavy chain variable region (VH) and/or a light chain variable region (VL), wherein: (i) the VH comprises a heavy chain complementarity determining region 1 (VHCDR1) having an amino acid sequence of a VHCDR1 in Table 30, Table 31, Table 10, Table 11, Table 12, or Table 13 (or a sequence with no more than 1, 2, 3, or 4 mutations, e.g., substitutions, additions, or deletions), a VHCDR2 having an amino acid sequence of a VHCDR2 in Table 30, Table 31, Table 10, Table 11, Table 12, or Table 13 (or a sequence with no more than 1, 2, 3, or 4 mutations, e.g., substitutions, additions, or deletions), and/or a VHCDR3 having an amino acid sequence of a VHCDR3 in Table 30, Table 31, Table 10, Table 11, Table 12, or Table 13 (or a sequence with no more than 1, 2, 3, or 4 mutations, e.g., substitutions, additions, or deletions), (ii) the VL comprises a light chain complementarity determining region 1 (VLCDR1) having an amino acid sequence of a VLCDR1 in Table 30, Table 31, Table 10, Table 11, Table 12, or Table 13 (or a sequence with no more than 1, 2, 3, or 4 mutations, e.g., substitutions, additions, or deletions), a VLCDR2 having an amino acid sequence of a VLCDR2 in Table 30, Table 31, Table 10, Table 11, Table 12, or Table 13 (or a sequence with no more than 1, 2, 3, or 4 mutations, e.g., substitutions, additions, or deletions), and/or a VLCDR3 having an amino acid sequence of a VLCDR3 in Table 30, Table 31, Table 10, Table 11, Table 12, or Table 13 (or a sequence with no more than 1, 2, 3, or 4 mutations, e.g., substitutions, additions, or deletions); (b) a heavy chain variable region (VH) and/or a light chain variable region (VL), wherein: (i) the VH comprises a heavy chain complementarity determining region 1 (VHCDR1) amino acid sequence of SEQ ID NO: 3 (or a sequence with no more than 1, 2, 3, or 4 mutations, e.g., substitutions, additions, or deletions), a VHCDR2 amino acid sequence of SEQ ID NO: 4 (or a sequence with no more than 1, 2, 3, or 4 mutations, e.g., substitutions, additions, or deletions), and/or a VHCDR3 amino acid sequence of SEQ ID NO: 5 (or a sequence with no more than 1, 2, 3, or 4 mutations, e.g., substitutions, additions, or deletions), and/or (ii) the VL comprises a light chain complementarity determining region 1 (VLCDR1) amino acid sequence of SEQ ID NO: 6 (or a sequence with no more than 1, 2, 3, or 4 mutations, e.g., substitutions, additions, or deletions), a VLCDR2 amino acid sequence of SEQ ID NO: 7 (or a sequence with no more than 1, 2, 3, or 4 mutations, e.g., substitutions, additions, or deletions), and/or a VLCDR3 amino acid sequence of SEQ ID NO: 8 (or a sequence with no more than 1, 2, 3, or 4 mutations, e.g., substitutions, additions, or deletions); (c) a heavy chain variable region (VH) and/or a light chain variable region (VL), wherein: (i) the VH comprises a heavy chain complementarity determining region 1 (VHCDR1) amino acid sequence of SEQ ID NO: 45 (or a sequence with no more than 1, 2, 3, or 4 mutations, e.g., substitutions, additions, or deletions), a VHCDR2 amino acid sequence of SEQ ID NO: 46 (or a sequence with no more than 1, 2, 3, or 4 mutations, e.g., substitutions, additions, or deletions), and/or a VHCDR3 amino acid sequence of SEQ ID NO: 47 (or a sequence with no more than 1, 2, 3, or 4 mutations, e.g., substitutions, additions, or deletions), and/or (ii) the VL comprises a light chain complementarity determining region 1 (VLCDR1) amino acid sequence of SEQ ID NO: 51 (or a sequence with no more than 1, 2, 3, or 4 mutations, e.g., substitutions, additions, or deletions), a VLCDR2 amino acid sequence of SEQ ID NO: 52 (or a sequence with no more than 1, 2, 3, or 4 mutations, e.g., substitutions, additions, or deletions), and/or a VLCDR3 amino acid sequence of SEQ ID NO: 53 (or a sequence with no more than 1, 2, 3, or 4 mutations, e.g., substitutions, additions, or deletions); and/or (d) a heavy chain variable region (VH) and/or a light chain variable region (VL), wherein: (i) the VH comprises a heavy chain complementarity determining region 1 (VHCDR1) amino acid sequence of SEQ ID NO: 48 (or a sequence with no more than 1, 2, 3, or 4 mutations, e.g., substitutions, additions, or deletions), a VHCDR2 amino acid sequence of SEQ ID NO: 49 (or a sequence with no more than 1, 2, 3, or 4 mutations, e.g., substitutions, additions, or deletions), and/or a VHCDR3 amino acid sequence of SEQ ID NO: 50 (or a sequence with no more than 1, 2, 3, or 4 mutations, e.g., substitutions, additions, or deletions), and/or (ii) the VL comprises a light chain complementarity determining region 1 (VLCDR1) amino acid sequence of SEQ ID NO: 54 (or a sequence with no more than 1, 2, 3, or 4 mutations, e.g., substitutions, additions, or deletions), a VLCDR2 amino acid sequence of SEQ ID NO: 55 (or a sequence with no more than 1, 2, 3, or 4 mutations, e.g., substitutions, additions, or deletions), and/or a VLCDR3 amino acid sequence of SEQ ID NO: 56 (or a sequence with no more than 1, 2, 3, or 4 mutations, e.g., substitutions, additions, or deletions).

[0012] In some embodiments, the second antigen binding domain comprises: (a) a heavy chain variable region (VH) and/or a light chain variable region (VL), wherein: (i) the VH comprises the amino acid sequence of a VH in Table 30, Table 31, Table 10, Table 11, Table 12, or Table 13 (or an amino acid sequence having at least about 77%, 80%, 85%, 90%, 95%, or 99% sequence identity thereto), and/or (ii) the VL comprises the amino acid sequence of a VL in Table 30, Table 31, Table 10, Table 11, Table 12, or Table 13 (or an amino acid sequence having at least about 77%, 80%, 85%, 90%, 95%, or 99% sequence identity thereto) (iii) the VH comprises the amino acid sequence of SEQ ID NO: 9 (or an amino acid sequence having at least about 77%, 80%, 85%, 90%, 95%, or 99% sequence identity thereto), and/or (iv) the VL comprises the amino acid sequence of SEQ ID NO: 10 (or an amino acid sequence having at least about 77%, 80%, 85%, 90%, 95%, or 99% sequence identity thereto); (b) a heavy chain variable region (VH) and/or a light chain variable region (VL), wherein: (i) the VH comprises the amino acid sequence of SEQ ID NO: 9 (or an amino acid sequence having at least about 77%, 80%, 85%, 90%, 95%, or 99% sequence identity thereto), and/or (ii) the VL comprises the amino acid sequence of SEQ ID NO: 11 (or an amino acid sequence having at least about 77%, 80%, 85%, 90%, 95%, or 99% sequence identity thereto); and/or (c) a heavy chain variable region (VH) and/or a light chain variable region (VL), wherein: (i) the VH comprises the amino acid sequence of SEQ ID NO: 1312 (or an amino acid sequence having at least about 77%, 80%, 85%, 90%, 95%, or 99% sequence identity thereto), and/or (ii) the VL comprises the amino acid sequence of SEQ ID NO: 1314 (or an amino acid sequence having at least about 77%, 80%, 85%, 90%, 95%, or 99% sequence identity thereto).

[0013] In some embodiments, the second antigen binding domain comprises: (a) a heavy chain variable region (VH) and/or a light chain variable region (VL), wherein: (i) the VH comprises a heavy chain complementarity determining region 1 (VHCDR1) amino acid sequence of SEQ ID NO: 17 (or a sequence with no more than 1, 2, 3, or 4 mutations, e.g., substitutions, additions, or deletions), a VHCDR2 amino acid sequence of SEQ ID NO: 18 (or a sequence with no more than 1, 2, 3, or 4 mutations, e.g., substitutions, additions, or deletions), and/or a VHCDR3 amino acid sequence of SEQ ID NO: 19 (or a sequence with no more than 1, 2, 3, or 4 mutations, e.g., substitutions, additions, or deletions), and/or (ii) the VL comprises a light chain complementarity determining region 1 (VLCDR1) amino acid sequence of SEQ ID NO: 20 (or a sequence with no more than 1, 2, 3, or 4 mutations, e.g., substitutions, additions, or deletions), a VLCDR2 amino acid sequence of SEQ ID NO: 21 (or a sequence with no more than 1, 2, 3, or 4 mutations, e.g., substitutions, additions, or deletions), and/or a VLCDR3 amino acid sequence of SEQ ID NO: 22 (or a sequence with no more than 1, 2, 3, or 4 mutations, e.g., substitutions, additions, or deletions); (b) a heavy chain variable region (VH) and/or a light chain variable region (VL), wherein: (i) the VH comprises a heavy chain complementarity determining region 1 (VHCDR1) amino acid sequence of SEQ ID NO: 57 (or a sequence with no more than 1, 2, 3, or 4 mutations, e.g., substitutions, additions, or deletions), a VHCDR2 amino acid sequence of SEQ ID NO: 58 (or a sequence with no more than 1, 2, 3, or 4 mutations, e.g., substitutions, additions, or deletions), and/or a VHCDR3 amino acid sequence of SEQ ID NO: 59 (or a sequence with no more than 1, 2, 3, or 4 mutations, e.g., substitutions, additions, or deletions), and/or (ii) the VL comprises a light chain complementarity determining region 1 (VLCDR1) amino acid sequence of SEQ ID NO: 63 (or a sequence with no more than 1, 2, 3, or 4 mutations, e.g., substitutions, additions, or deletions), a VLCDR2 amino acid sequence of SEQ ID NO: 64 (or a sequence with no more than 1, 2, 3, or 4 mutations, e.g., substitutions, additions, or deletions), and/or a VLCDR3 amino acid sequence of SEQ ID NO: 65 (or a sequence with no more than 1, 2, 3, or 4 mutations, e.g., substitutions, additions, or deletions); and/or (c) a heavy chain variable region (VH) and/or a light chain variable region (VL), wherein: (i) the VH comprises a heavy chain complementarity determining region 1 (VHCDR1) amino acid sequence of SEQ ID NO: 60 (or a sequence with no more than 1, 2, 3, or 4 mutations, e.g., substitutions, additions, or deletions), a VHCDR2 amino acid sequence of SEQ ID NO: 61 (or a sequence with no more than 1, 2, 3, or 4 mutations, e.g., substitutions, additions, or deletions), and/or a VHCDR3 amino acid sequence of SEQ ID NO: 62 (or a sequence with no more than 1, 2, 3, or 4 mutations, e.g., substitutions, additions, or deletions), and/or (ii) the VL comprises a light chain complementarity determining region 1 (VLCDR1) amino acid sequence of SEQ ID NO: 66 (or a sequence with no more than 1, 2, 3, or 4 mutations, e.g., substitutions, additions, or deletions), a VLCDR2 amino acid sequence of SEQ ID NO: 67 (or a sequence with no more than 1, 2, 3, or 4 mutations, e.g., substitutions, additions, or deletions), and/or a VLCDR3 amino acid sequence of SEQ ID NO: 68 (or a sequence with no more than 1, 2, 3, or 4 mutations, e.g., substitutions, additions, or deletions).

[0014] In some embodiments, the second antigen binding domain comprises: (a) a heavy chain variable region (VH) and/or a light chain variable region (VL), wherein: (i) the VH comprises the amino acid sequence of SEQ ID NO: 15 (or an amino acid sequence having at least about 77%, 80%, 85%, 90%, 95%, or 99% sequence identity thereto), and/or (ii) the VL comprises the amino acid sequence of SEQ ID NO: 16 (or an amino acid sequence having at least about 77%, 80%, 85%, 90%, 95%, or 99% sequence identity thereto); and/or (b) a heavy chain variable region (VH) and/or a light chain variable region (VL), wherein: (i) the VH comprises: the amino acid sequence of SEQ ID NO: 23 (or an amino acid sequence having at least about 77%, 80%, 85%, 90%, 95%, or 99% sequence identity thereto), the amino acid sequence of SEQ ID NO: 24 (or an amino acid sequence having at least about 77%, 80%, 85%, 90%, 95%, or 99% sequence identity thereto), or the amino acid sequence of SEQ ID NO: 25 (or an amino acid sequence having at least about 77%, 80%, 85%, 90%, 95%, or 99% sequence identity thereto); and/or (ii) the VL comprises: the amino acid sequence of SEQ ID NO: 26 (or an amino acid sequence having at least about 77%, 80%, 85%, 90%, 95%, or 99% sequence identity thereto), the amino acid sequence of SEQ ID NO: 27 (or an amino acid sequence having at least about 77%, 80%, 85%, 90%, 95%, or 99% sequence identity thereto), the amino acid sequence of SEQ ID NO: 28 (or an amino acid sequence having at least about 77%, 80%, 85%, 90%, 95%, or 99% sequence identity thereto), the amino acid sequence of SEQ ID NO: 29 (or an amino acid sequence having at least about 77%, 80%, 85%, 90%, 95%, or 99% sequence identity thereto), or the amino acid sequence of SEQ ID NO: 30 (or an amino acid sequence having at least about 77%, 80%, 85%, 90%, 95%, or 99% sequence identity thereto).

[0015] In some embodiments, the composition as describe herein comprises: a first polypeptide comprising, e.g., from N-terminus to C-terminus, a first VL and a first CL, a second polypeptide comprising, e.g., from N-terminus to C-terminus, a first VH, a first CH1, a first dimerization domain (e.g., a first Fc), and a first moiety that binds to TCR (e.g., TCRVβ) (e.g., a first scFv that binds to TCR (e.g., TCRVβ), a third polypeptide comprising, e.g., from N-terminus to C-terminus, a second VH, a second CH1, a second dimerization domain (e.g., a second Fc), and optionally a second moiety that binds to TCR (e.g., TCRVβ) (e.g., a second scFv that binds to TCR (e.g., TCRVβ), a fourth polypeptide comprising, e.g., from N-terminus to C-terminus, a second VL and a second CL, wherein: the first VL and the first VH form a first antigen binding domain that binds to a first calreticulin protein, and the second VL and the second VH form a third antigen binding domain that binds to a second calreticulin protein, optionally wherein the first and second calreticulin proteins comprise the amino acid sequence of SEQ ID NO: 6285, 1001, or 6286, optionally wherein the first and second calreticulin mutant proteins are each independently chosen from: a molecule comprising the amino acid sequence of SEQ ID NO: 6313, or a molecule comprising the amino acid sequence of SEQ ID NO: 6314, optionally wherein the multifunctional molecule comprises the configuration of FIG. 3A or 3B.

[0016] In some embodiments, the second antigen binding domain binds to NKp30.

[0017] In some embodiments, the second antigen binding domain is chosen from an antibody molecule, e.g., an antigen binding domain, or ligand that binds to (e.g., activates) NKp30, e.g., the second antigen binding domain is an antibody molecule or ligand that binds to (e.g., activates) NKp30.

[0018] In some embodiments, the second antigen binding domain comprises: (i) a heavy chain variable region (VH) comprising a heavy chain complementarity determining region 1 (VHCDR1) having an amino acid sequence of a VHCDR1 of Table 7, Table 35, Table 9, Table 10, or Table 34 (or a sequence with no more than 1, 2, 3, or 4 mutations, e.g., substitutions, additions, or deletions), a VHCDR2 having an amino acid sequence of a VHCDR2 of Table 7, Table 35, Table 9, Table 10, or Table 34 (or a sequence with no more than 1, 2, 3, or 4 mutations, e.g., substitutions, additions, or deletions), and/or a VHCDR3 having an amino acid sequence of a VHCDR3 of Table 7, Table 35, Table 9, Table 10, or Table 34 (or a sequence with no more than 1, 2, 3, or 4 mutations, e.g., substitutions, additions, or deletions), and/or (ii) a light chain variable region (VL) comprising a light chain complementarity determining region 1 (VLCDR1) having an amino acid sequence of a VLCDR1 of Table 8, Table 36, Table 9, Table 10, or Table 34 (or a sequence with no more than 1, 2, 3, or 4 mutations, e.g., substitutions, additions, or deletions), a VLCDR2 having an amino acid sequence of a VLCDR2 of Table 8, Table 36, Table 9, Table 10, or Table 34 (or a sequence with no more than 1, 2, 3, or 4 mutations, e.g., substitutions, additions, or deletions), and/or a VLCDR3 having an amino acid sequence of a VLCDR3 of Table 8, Table 36, Table 9, Table 10, or Table 34 (or a sequence with no more than 1, 2, 3, or 4 mutations, e.g., substitutions, additions, or deletions).

[0019] In some embodiments, the second antigen binding domain comprises: (i) a heavy chain variable region (VH) comprising a heavy chain complementarity determining region 1 (VHCDR1) amino acid sequence of SEQ ID NO: 7313 (or a sequence with no more than 1, 2, 3, or 4 mutations, e.g., substitutions, additions, or deletions), a VHCDR2 amino acid sequence of SEQ ID NO: 6001 (or a sequence with no more than 1, 2, 3, or 4 mutations, e.g., substitutions, additions, or deletions, and/or a VHCDR3 amino acid sequence of SEQ ID NO: 7315 (or a sequence with no more than 1, 2, 3, or 4 mutations, e.g., substitutions, additions, or deletions; and/or (ii) a light chain variable region (VL) comprising a light chain complementarity determining region 1 (VLCDR1) amino acid sequence of SEQ ID NO: 7326 (or a sequence with no more than 1, 2, 3, or 4 mutations, e.g., substitutions, additions, or deletions), a VLCDR2 amino acid sequence of SEQ ID NO: 7327 (or a sequence with no more than 1, 2, 3, or 4 mutations, e.g., substitutions, additions, or deletions), and/or a VLCDR3 amino acid sequence of SEQ ID NO: 7329 (or a sequence with no more than 1, 2, 3, or 4 mutations, e.g., substitutions, additions, or deletions).

[0020] In some embodiments, the second antigen binding domain comprises: (i) a VH comprising the amino acid sequence of any of SEQ ID NOs: 7298 or 7300-7304 (or an amino acid sequence having at least about 75%, 80%, 85%, 90%, 95%, or 99% sequence identity to any of SEQ ID NOs: 7298 or 7300-7304); and/or (ii) a VL comprising the amino acid sequence of any of SEQ ID NOs: 7299 or 7305-7309 (or an amino acid sequence having at least about 93%, 95%, or 99% sequence identity to any of SEQ ID NOs: 7299 or 7305-7309).

[0021] In some embodiments, the second antigen binding domain comprises: (i) a VH comprising the amino acid sequence of SEQ ID NO: 7302 (or an amino acid sequence having at least about 75%, 80%, 85%, 90%, 95%, or 99% sequence identity to 7302), and a VL comprising the amino acid sequence of SEQ ID NO: 7305 (or an amino acid sequence having at least about 75%, 80%, 85%, 90%, 95%, or 99% sequence identity to 7305); or (ii) a VH comprising the amino acid sequence of SEQ ID NO: 7302 (or an amino acid sequence having at least about 75%, 80%, 85%, 90%, 95%, or 99% sequence identity to 7302), and a VL comprising the amino acid sequence of SEQ ID NO: 7309 (or an amino acid sequence having at least about 75%, 80%, 85%, 90%, 95%, or 99% sequence identity to 7309).

[0022] In some embodiments, the second antigen binding domain comprises: (i) an amino acid sequence of SEQ ID NO: 7310 (or an amino acid sequence having at least about 75%, 80%, 85%, 90%, 95%, or 99% sequence identity to 7310); or (ii) an amino acid sequence of SEQ ID NO: 7311 (or an amino acid sequence having at least about 75%, 80%, 85%, 90%, 95%, or 99% sequence identity to 7311).

[0023] In some embodiments, the second antigen binding domain comprises: a heavy chain variable region (VH) comprising a heavy chain complementarity determining region 1 (VHCDR1) amino acid sequence of SEQ ID NO: 6000, a VHCDR2 amino acid sequence of SEQ ID NO: 6001, and/or a VHCDR3 amino acid sequence of SEQ ID NO: 6002, and (ii) a light chain variable region (VL) comprising a light chain complementarity determining region 1 (VLCDR1) amino acid sequence of SEQ ID NO: 6063, a VLCDR2 amino acid sequence of SEQ ID NO: 6064, and/or a VLCDR3 amino acid sequence of SEQ ID NO: 7293.

[0024] In some embodiments, the second antigen binding domain comprises: (1) a heavy chain variable region (VH) comprising a heavy chain framework region 1 (VHFWR1) having an amino acid sequence of a VHFWR1 of Table 7, Table 35, Table 9, Table 10, or Table 34 (or a sequence with no more than 1, 2, 3, 4, 5, or 6 mutations, e.g., substitutions, additions, or deletions, therefrom), a VHFWR2 having an amino acid sequence of a VHFWR2 of Table 7, Table 35, Table 9, Table 10, or Table 34 (or a sequence with no more than 1, 2, 3, 4, 5, or 6 mutations, e.g., substitutions, additions, or deletions, therefrom), a VHFWR3 having an amino acid sequence of a VHFWR3 of Table 7, Table 35, Table 9, Table 10, or Table 34 (or a sequence with no more than 1, 2, 3, 4, 5, or 6 mutations, e.g., substitutions, additions, or deletions, therefrom), or a VHFWR4 having an amino acid sequence of a VHFWR4 of Table 7, Table 35, Table 9, Table 10, or Table 34 (or a sequence with no more than 1, 2, 3, 4, 5, or 6 mutations, e.g., substitutions, additions, or deletions, therefrom), and/or (2) a light chain variable region (VL) comprising a light chain framework region 1 (VLFWR1) having an amino acid sequence of a VLFWR1 of Table 8, Table 36, Table 9, Table 10, or Table 34 (or a sequence with no more than 1, 2, 3, 4, 5, or 6 mutations, e.g., substitutions, additions, or deletions, therefrom), a VLFWR2 having an amino acid sequence of a VLFWR2 of Table 8, Table 36, Table 9, Table 10, or Table 34 (or a sequence with no more than 1, 2, 3, 4, 5, or 6 mutations, e.g., substitutions, additions, or deletions, therefrom), a VLFWR3 having an amino acid sequence of a VLFWR3 of Table 8, Table 36, Table 9, Table 10, or Table 34 (or a sequence with no more than 1, 2, 3, 4, 5, or 6 mutations, e.g., substitutions, additions, or deletions, therefrom), or a VLFWR4 having an amino acid sequence of a VLFWR4 of Table 8, Table 36, Table 9, Table 10, or Table 34 (or a sequence with no more than 1, 2, 3, 4, 5, or 6 mutations, e.g., substitutions, additions, or deletions, therefrom).

[0025] In some embodiments, the second antigen binding domain comprises: (1) a heavy chain variable region (VH) comprising a heavy chain framework region 1 (VHFWR1) amino acid sequence of SEQ ID NO: 6003, a VHFWR2 amino acid sequence of SEQ ID NO: 6004, a VHFWR3 amino acid sequence of SEQ ID NO: 6005, or a VHFWR4 amino acid sequence of SEQ ID NO: 6006, and (3) a light chain variable region (VL) comprising a light chain framework region 1 (VLFWR1) amino acid sequence of SEQ ID NO: 6066, a VLFWR2 amino acid sequence of SEQ ID NO: 6067, a VLFWR3 amino acid sequence of SEQ ID NO: 7292, or a VLFWR4 amino acid sequence of SEQ ID NO: 6069.

[0026] In some embodiments, the second antigen binding domain comprises: (i) a VH comprising the amino acid sequence of a VH of Table 7, Table 35, Table 9, Table 10, or Table 34 (or an amino acid sequence having at least about 75%, 80%, 85%, 90%, 95%, or 99% sequence identity thereto), and/or (ii) a VL comprising the amino acid sequence of a VL of Table 8, Table 36, Table 9, Table 10, or Table 34 (or an amino acid sequence having at least about 93%, 95%, or 99% sequence identity thereto).

[0027] In some embodiments, the second antigen binding domain comprises a heavy chain comprising the amino acid sequence of a heavy chain of Table 10 (or an amino acid sequence having at least about 75%, 80%, 85%, 90%, 95%, or 99% sequence identity thereto).

[0028] In some embodiments, the second antigen binding domain comprises a light chain comprising the amino acid sequence of a light chain of Table 10 (or an amino acid sequence having at least about 75%, 80%, 85%, 90%, 95%, or 99% sequence identity thereto).

[0029] In some embodiments, the second antigen binding domain comprises a heavy chain comprising the amino acid sequence of a heavy chain of Table 10 (or an amino acid sequence having at least about 75%, 80%, 85%, 90%, 95%, or 99% sequence identity thereto), and a light chain comprising the amino acid sequence of a light chain of Table 10 (or an amino acid sequence having at least about 75%, 80%, 85%, 90%, 95%, or 99% sequence identity thereto).

[0030] In some embodiments, the composition as described herein comprises: a first polypeptide comprising, e.g., from N-terminus to C-terminus, a first VL and a first CL, a second polypeptide comprising, e.g., from N-terminus to C-terminus, a first VH, a first CH1, a first dimerization domain (e.g., a first Fc), and a first moiety that binds to NKp30 (e.g., a first antibody molecule or ligand that binds to NKp30), a third polypeptide comprising, e.g., from N-terminus to C-terminus, a second VH, a second CH1, a second dimerization domain (e.g., a second Fc), and optionally a second moiety that binds to NKp30 (e.g., a second antibody molecule or ligand that binds to NKp30), a fourth polypeptide comprising, e.g., from N-terminus to C-terminus, a second VL and a second CL, wherein: the first VL and the first VH form a first antigen binding domain that binds to a first calreticulin protein, and the second VL and the second VH from a third antigen binding domain that binds to a second calreticulin protein, optionally wherein the first and second calreticulin proteins comprise the amino acid sequence of SEQ ID NO: 6285, 1001, or 6286, optionally wherein the first and second calreticulin mutant proteins are each independently chosen from: a molecule comprising the amino acid sequence of SEQ ID NO: 6313, or a molecule comprising the amino acid sequence of SEQ ID NO: 6314, optionally wherein the multifunctional molecule comprises the configuration of FIG. 3A or 3B.

[0031] In some embodiments, the calreticulin protein comprises an amino acid sequence chosen from SEQ ID NOs: 6285-6312 or 1001, optionally wherein the calreticulin protein comprises an amino acid sequence chosen from SEQ ID NOs: 6313-6346 or 1002-1003.

[0032] In some embodiments, the calreticulin protein comprises the amino acid sequence of SEQ ID NO: 6285 or 1001.

[0033] In some embodiments, the calreticulin protein comprises the amino acid sequence of SEQ ID NO: 6286.

[0034] In some embodiments, the first antigen binding domain binds to an epitope located within the C-terminus of the calreticulin protein, optionally wherein the first antigen binding domain binds to an epitope located within the amino acid sequence of SEQ ID NO: 6285, 1001, or 6286.

[0035] In some embodiments, the composition as described herein further comprises a third antigen binding domain that binds to a second calreticulin protein, e.g., wherein the second calreticulin mutant protein comprises the amino acid sequence of SEQ ID NO: 6285, 1001, or 6286, optionally wherein: (i) the third antigen binding domain is different from the first antigen binding domain, or (ii) the third antigen binding domain is the same as the first antigen binding domain.

[0036] In some embodiments, the second calreticulin molecule is the same as the calreticulin molecule bound by the first antigen binding domain.

[0037] In some embodiments, the second calreticulin molecule is different from the calreticulin molecule bound by the first antigen binding domain.

[0038] In some embodiments, the second calreticulin protein comprises an amino acid sequence chosen from SEQ ID NOs: 6285-6312 or 1001, optionally wherein the second calreticulin protein comprises an amino acid sequence chosen from SEQ ID NOs: 6313-6346 or 1002-1003.

[0039] In some embodiments, the calreticulin protein bound by the first antigen binding domain comprises the amino acid sequence of SEQ ID NO: 6285 or 1001, and the second calreticulin protein comprises the amino acid sequence of SEQ ID NO: 6286.

[0040] In some embodiments, the third antigen binding domain binds to an epitope located within the C-terminus of the second calreticulin protein, optionally wherein the third antigen binding domain binds to an epitope located within the amino acid sequence of SEQ ID NO: 6285, 1001, or 6286.

[0041] In some embodiments, the first antigen binding domain comprises: (i) a heavy chain variable region (VH) comprising a heavy chain complementarity determining region 1 (VHCDR1) having an amino acid sequence of a VHCDR1 in Table 4, Table 24, Table 25, or Table 17 (or a sequence with no more than 1, 2, 3, or 4 mutations, e.g., substitutions, additions, or deletions), a VHCDR2 having an amino acid sequence of a VHCDR2 in Table 4, Table 24, Table 25, or Table 17 (or a sequence with no more than 1, 2, 3, or 4 mutations, e.g., substitutions, additions, or deletions), and/or a VHCDR3 having an amino acid sequence of a VHCDR3 in Table 4, Table 24, Table 25, or Table 17 (or a sequence with no more than 1, 2, 3, or 4 mutations, e.g., substitutions, additions, or deletions); (ii) a light chain variable region (VL) comprising a light chain complementarity determining region 1 (VLCDR1) having an amino acid sequence of a VLCDR1 in Table 5, Table 24, Table 25, or Table 18 (or a sequence with no more than 1, 2, 3, or 4 mutations, e.g., substitutions, additions, or deletions), a VLCDR2 having an amino acid sequence of a VLCDR2 in Table 5, Table 24, Table 25, or Table 18 (or a sequence with no more than 1, 2, 3, or 4 mutations, e.g., substitutions, additions, or deletions), and/or a VLCDR3 having an amino acid sequence of a VLCDR3 in Table 5, Table 24, Table 25, or Table 18 (or a sequence with no more than 1, 2, 3, or 4 mutations, e.g., substitutions, additions, or deletions); (iii) a VH comprising the amino acid sequence of a VH in Table 24, Table 25, or Table 16 (or an amino acid sequence having at least about 77%, 80%, 85%, 90%, 95%, or 99% sequence identity thereto); (iv) a VL comprising the amino acid sequence of a VL in Table 24, Table 25, or Table 16 (or an amino acid sequence having at least about 93%, 95%, or 99% sequence identity thereto); (v) a VH comprising a heavy chain framework region 1 (VHFWR1) having an amino acid sequence of a VHFWR1 in Table 4 or Table 6 (or a sequence with no more than 1, 2, 3, 4, 5, 6, 7, 8, or 9 mutations, e.g., substitutions, additions, or deletions), a VHFWR2 having an amino acid sequence of a VHFWR2 in Table 4 or Table 6 (or a sequence with no more than 1, 2, 3, 4, 5, 6, 7, 8, or 9 mutations, e.g., substitutions, additions, or deletions), a VHFWR3 having an amino acid sequence of a VHFWR3 in Table 4 or Table 6 (or a sequence with no more than 1, 2, 3, 4, 5, 6, 7, 8, or 9 mutations, e.g., substitutions, additions, or deletions), and/or a VHFWR4 having an amino acid sequence of a VHFWR4 in Table 4 or Table 6 (or a sequence with no more than 1, 2, 3, 4, 5, 6, 7, 8, or 9 mutations, e.g., substitutions, additions, or deletions), and/or (vi) a VL comprising a light chain framework region 1 (VLFWR1) having an amino acid sequence of a VLFWR1 in Table 5 or Table 6 (or a sequence with no more than 1, 2, 3, 4, 5, 6, 7, 8, or 9 mutations, e.g., substitutions, additions, or deletions), a VLFWR2 having an amino acid sequence of a VLFWR2 in Table 5 or Table 6 (or a sequence with no more than 1, 2, 3, 4, 5, 6, 7, 8, or 9 mutations, e.g., substitutions, additions, or deletions), a VLFWR3 having an amino acid sequence of a VLFWR3 in Table 5 or Table 6 (or a sequence with no more than 1, 2, 3, 4, 5, 6, 7, 8, or 9 mutations, e.g., substitutions, additions, or deletions), and/or a VLFWR4 having an amino acid sequence of a VLFWR4 in Table 5 or Table 6 (or a sequence with no more than 1, 2, 3, 4, 5, 6, 7, 8, or 9 mutations, e.g., substitutions, additions, or deletions).

[0042] In some embodiments, the multifunctional molecule further comprises a tumor-targeting moiety.

[0043] In some embodiments, the tumor-targeting moiety binds to a tumor antigen.

[0044] In some embodiments, the tumor antigen is selected from G6B, CD34, CD41, P-selectin, Clec2, cKIT, FLT3, MPL, ITGB3, ITGB2, GP5, GP6, GP9, GP1BA, DSC2, FCGR2A, TNFRSF10A, TNFRSF10B, or TM4SF1.

[0045] In some embodiments, the tumor-targeting moiety comprises an antibody molecule, e.g., that binds to a tumor antigen selected from G6B, CD34, CD41, P-selectin, Clec2, cKIT, FLT3, MPL, ITGB3, ITGB2, GP5, GP6, GP9, GP1BA, DSC2, FCGR2A, TNFRSF10A, TNFRSF10B, or TM4SF1.

[0046] In some embodiments, the tumor-targeting moiety comprises a VH and/or VL sequence, e.g., as listed in Table 38 or Table 20.

[0047] In some embodiments, the multifunctional molecule preferentially binds to a myeloproliferative neoplasm cell over a non-tumor cell, optionally wherein the binding between the multifunctional molecule and the myeloproliferative neoplasm cell is more than 10, 20, 30, 40, 50-fold greater than the binding between the multifunctional molecule and a non-tumor cell.

[0048] In some embodiments, the myeloproliferative neoplasm cell is chosen from a myelofibrosis cell, an essential thrombocythemia cell, a polycythemia vera cell, or a chronic myeloid cancer cell, optionally wherein: the myeloproliferative neoplasm cell does not comprise a JAK2 V617F mutation, or the myeloproliferative neoplasm cell does not comprise a MPL mutation.

[0049] In some embodiments, the composition as described herein further comprises a linker, e.g., a linker between the first antigen binding domain and the second antigen binding domain.

[0050] In some embodiments, the linker is chosen from: a cleavable linker, a non-cleavable linker, a peptide linker, a flexible linker, a rigid linker, a helical linker, or a non-helical linker.

[0051] In some embodiments, the linker is a peptide linker.

[0052] In some embodiments, the peptide linker comprises Gly and Ser.

[0053] In some embodiments, the peptide linker comprises an amino acid sequence chosen from SEQ ID NOs: 6214-6217 or 6220-6221 and 77-78.

[0054] In another aspect, provides herein is a multifunctional molecule comprising: (i) a first antigen binding domain that binds to a calreticulin protein (e.g., a wild-type or mutant calreticulin protein), e.g., a calreticulin-targeting antigen binding domain disclosed in any one of Table 4, Table 5, Table 6, Table 24, Table 25, Table 16, Table 17, Table 18, or Table 19, and (ii) a second antigen binding domain that binds to TCRβV, e.g., an anti-TCRβV antigen binding domain disclosed in any one of Table 30, Table 31, Table 32, Table 10, Table 11, Table 12, or Table 13, or a second antigen binding domain that binds to NKp30, e.g., an anti-NKp30 antigen binding domain disclosed in Table 7, Table 8, Table 35, Table 36, Table 9, Table 10, or Table 34.

[0055] In some embodiments, the second antigen binding domain binds to TCRβV.

[0056] In some embodiments, the second antigen binding domain activates a T cell or the second antigen binding domain does not activate a T cell.

[0057] In some embodiments, the second antigen binding domain binds to TCRβV12 or TCRβV6 (e.g., comprising the amino acid sequence of SEQ ID NO: 1044).

[0058] In some embodiments, the second antigen binding domain comprises one or more amino acid sequences as listed in Table 30, Table 31, Table 32, Table 10, Table 11, Table 12, or Table 13.

[0059] In some embodiments, the second antigen binding domain comprises: (a) a heavy chain variable region (VH) and/or a light chain variable region (VL), wherein: (i) the VH comprises a heavy chain complementarity determining region 1 (VHCDR1) having an amino acid sequence of a VHCDR1 in Table 30, Table 31, Table 10, Table 11, Table 12, or Table 13 (or a sequence with no more than 1, 2, 3, or 4 mutations, e.g., substitutions, additions, or deletions), a VHCDR2 having an amino acid sequence of a VHCDR2 in Table 30, Table 31, Table 10, Table 11, Table 12, or Table 13 (or a sequence with no more than 1, 2, 3, or 4 mutations, e.g., substitutions, additions, or deletions), and/or a VHCDR3 having an amino acid sequence of a VHCDR3 in Table 30, Table 31, Table 10, Table 11, Table 12, or Table 13 (or a sequence with no more than 1, 2, 3, or 4 mutations, e.g., substitutions, additions, or deletions), (ii) the VL comprises a light chain complementarity determining region 1 (VLCDR1) having an amino acid sequence of a VLCDR1 in Table 30, Table 31, Table 10, Table 11, Table 12, or Table 13 (or a sequence with no more than 1, 2, 3, or 4 mutations, e.g., substitutions, additions, or deletions), a VLCDR2 having an amino acid sequence of a VLCDR2 in Table 30, Table 31, Table 10, Table 11, Table 12, or Table 13 (or a sequence with no more than 1, 2, 3, or 4 mutations, e.g., substitutions, additions, or deletions), and/or a VLCDR3 having an amino acid sequence of a VLCDR3 in Table 30, Table 31, Table 10, Table 11, Table 12, or Table 13 (or a sequence with no more than 1, 2, 3, or 4 mutations, e.g., substitutions, additions, or deletions); (b) a heavy chain variable region (VH) and/or a light chain variable region (VL), wherein: (i) the VH comprises a heavy chain complementarity determining region 1 (VHCDR1) amino acid sequence of SEQ ID NO: 3 (or a sequence with no more than 1, 2, 3, or 4 mutations, e.g., substitutions, additions, or deletions), a VHCDR2 amino acid sequence of SEQ ID NO: 4 (or a sequence with no more than 1, 2, 3, or 4 mutations, e.g., substitutions, additions, or deletions), and/or a VHCDR3 amino acid sequence of SEQ ID NO: 5 (or a sequence with no more than 1, 2, 3, or 4 mutations, e.g., substitutions, additions, or deletions), and/or (ii) the VL comprises a light chain complementarity determining region 1 (VLCDR1) amino acid sequence of SEQ ID NO: 6 (or a sequence with no more than 1, 2, 3, or 4 mutations, e.g., substitutions, additions, or deletions), a VLCDR2 amino acid sequence of SEQ ID NO: 7 (or a sequence with no more than 1, 2, 3, or 4 mutations, e.g., substitutions, additions, or deletions), and/or a VLCDR3 amino acid sequence of SEQ ID NO: 8 (or a sequence with no more than 1, 2, 3, or 4 mutations, e.g., substitutions, additions, or deletions); (c) a heavy chain variable region (VH) and/or a light chain variable region (VL), wherein: (i) the VH comprises a heavy chain complementarity determining region 1 (VHCDR1) amino acid sequence of SEQ ID NO: 45 (or a sequence with no more than 1, 2, 3, or 4 mutations, e.g., substitutions, additions, or deletions), a VHCDR2 amino acid sequence of SEQ ID NO: 46 (or a sequence with no more than 1, 2, 3, or 4 mutations, e.g., substitutions, additions, or deletions), and/or a VHCDR3 amino acid sequence of SEQ ID NO: 47 (or a sequence with no more than 1, 2, 3, or 4 mutations, e.g., substitutions, additions, or deletions), and/or (ii) the VL comprises a light chain complementarity determining region 1 (VLCDR1) amino acid sequence of SEQ ID NO: 51 (or a sequence with no more than 1, 2, 3, or 4 mutations, e.g., substitutions, additions, or deletions), a VLCDR2 amino acid sequence of SEQ ID NO: 52 (or a sequence with no more than 1, 2, 3, or 4 mutations, e.g., substitutions, additions, or deletions), and/or a VLCDR3 amino acid sequence of SEQ ID NO: 53 (or a sequence with no more than 1, 2, 3, or 4 mutations, e.g., substitutions, additions, or deletions); and/or (d) a heavy chain variable region (VH) and/or a light chain variable region (VL), wherein: (i) the VH comprises a heavy chain complementarity determining region 1 (VHCDR1) amino acid sequence of SEQ ID NO: 48 (or a sequence with no more than 1, 2, 3, or 4 mutations, e.g., substitutions, additions, or deletions), a VHCDR2 amino acid sequence of SEQ ID NO: 49 (or a sequence with no more than 1, 2, 3, or 4 mutations, e.g., substitutions, additions, or deletions), and/or a VHCDR3 amino acid sequence of SEQ ID NO: 50 (or a sequence with no more than 1, 2, 3, or 4 mutations, e.g., substitutions, additions, or deletions), and/or (ii) the VL comprises a light chain complementarity determining region 1 (VLCDR1) amino acid sequence of SEQ ID NO: 54 (or a sequence with no more than 1, 2, 3, or 4 mutations, e.g., substitutions, additions, or deletions), a VLCDR2 amino acid sequence of SEQ ID NO: 55 (or a sequence with no more than 1, 2, 3, or 4 mutations, e.g., substitutions, additions, or deletions), and/or a VLCDR3 amino acid sequence of SEQ ID NO: 56 (or a sequence with no more than 1, 2, 3, or 4 mutations, e.g., substitutions, additions, or deletions).

[0060] In some embodiments, the second antigen binding domain comprises: (a) a heavy chain variable region (VH) and/or a light chain variable region (VL), wherein: (i) the VH comprises the amino acid sequence of a VH in Table 30, Table 31, Table 10, Table 11, Table 12, or Table 13 (or an amino acid sequence having at least about 77%, 80%, 85%, 90%, 95%, or 99% sequence identity thereto), and/or (ii) the VL comprises the amino acid sequence of a VL in Table 30, Table 31, Table 10, Table 11, Table 12, or Table 13 (or an amino acid sequence having at least about 77%, 80%, 85%, 90%, 95%, or 99% sequence identity thereto) (iii) the VH comprises the amino acid sequence of SEQ ID NO: 9 (or an amino acid sequence having at least about 77%, 80%, 85%, 90%, 95%, or 99% sequence identity thereto), and/or (iv) the VL comprises the amino acid sequence of SEQ ID NO: 10 (or an amino acid sequence having at least about 77%, 80%, 85%, 90%, 95%, or 99% sequence identity thereto); (b) a heavy chain variable region (VH) and/or a light chain variable region (VL), wherein: (i) the VH comprises the amino acid sequence of SEQ ID NO: 9 (or an amino acid sequence having at least about 77%, 80%, 85%, 90%, 95%, or 99% sequence identity thereto), and/or (ii) the VL comprises the amino acid sequence of SEQ ID NO: 11 (or an amino acid sequence having at least about 77%, 80%, 85%, 90%, 95%, or 99% sequence identity thereto); and/or (c) a heavy chain variable region (VH) and/or a light chain variable region (VL), wherein: (i) the VH comprises the amino acid sequence of SEQ ID NO: 1312 (or an amino acid sequence having at least about 77%, 80%, 85%, 90%, 95%, or 99% sequence identity thereto), and/or (ii) the VL comprises the amino acid sequence of SEQ ID NO: 1314 (or an amino acid sequence having at least about 77%, 80%, 85%, 90%, 95%, or 99% sequence identity thereto).

[0061] In some embodiments, the second antigen binding domain comprises: (a) a heavy chain variable region (VH) and/or a light chain variable region (VL), wherein: (i) the VH comprises a heavy chain complementarity determining region 1 (VHCDR1) amino acid sequence of SEQ ID NO: 17 (or a sequence with no more than 1, 2, 3, or 4 mutations, e.g., substitutions, additions, or deletions), a VHCDR2 amino acid sequence of SEQ ID NO: 18 (or a sequence with no more than 1, 2, 3, or 4 mutations, e.g., substitutions, additions, or deletions), and/or a VHCDR3 amino acid sequence of SEQ ID NO: 19 (or a sequence with no more than 1, 2, 3, or 4 mutations, e.g., substitutions, additions, or deletions), and/or (ii) the VL comprises a light chain complementarity determining region 1 (VLCDR1) amino acid sequence of SEQ ID NO: 20 (or a sequence with no more than 1, 2, 3, or 4 mutations, e.g., substitutions, additions, or deletions), a VLCDR2 amino acid sequence of SEQ ID NO: 21 (or a sequence with no more than 1, 2, 3, or 4 mutations, e.g., substitutions, additions, or deletions), and/or a VLCDR3 amino acid sequence of SEQ ID NO: 22 (or a sequence with no more than 1, 2, 3, or 4 mutations, e.g., substitutions, additions, or deletions); (b) a heavy chain variable region (VH) and/or a light chain variable region (VL), wherein: (i) the VH comprises a heavy chain complementarity determining region 1 (VHCDR1) amino acid sequence of SEQ ID NO: 57 (or a sequence with no more than 1, 2, 3, or 4 mutations, e.g., substitutions, additions, or deletions), a VHCDR2 amino acid sequence of SEQ ID NO: 58 (or a sequence with no more than 1, 2, 3, or 4 mutations, e.g., substitutions, additions, or deletions), and/or a VHCDR3 amino acid sequence of SEQ ID NO: 59 (or a sequence with no more than 1, 2, 3, or 4 mutations, e.g., substitutions, additions, or deletions), and/or (ii) the VL comprises a light chain complementarity determining region 1 (VLCDR1) amino acid sequence of SEQ ID NO: 63 (or a sequence with no more than 1, 2, 3, or 4 mutations, e.g., substitutions, additions, or deletions), a VLCDR2 amino acid sequence of SEQ ID NO: 64 (or a sequence with no more than 1, 2, 3, or 4 mutations, e.g., substitutions, additions, or deletions), and/or a VLCDR3 amino acid sequence of SEQ ID NO: 65 (or a sequence with no more than 1, 2, 3, or 4 mutations, e.g., substitutions, additions, or deletions); and/or (c) a heavy chain variable region (VH) and/or a light chain variable region (VL), wherein: (i) the VH comprises a heavy chain complementarity determining region 1 (VHCDR1) amino acid sequence of SEQ ID NO: 60 (or a sequence with no more than 1, 2, 3, or 4 mutations, e.g., substitutions, additions, or deletions), a VHCDR2 amino acid sequence of SEQ ID NO: 61 (or a sequence with no more than 1, 2, 3, or 4 mutations, e.g., substitutions, additions, or deletions), and/or a VHCDR3 amino acid sequence of SEQ ID NO: 62 (or a sequence with no more than 1, 2, 3, or 4 mutations, e.g., substitutions, additions, or deletions), and/or (ii) the VL comprises a light chain complementarity determining region 1 (VLCDR1) amino acid sequence of SEQ ID NO: 66 (or a sequence with no more than 1, 2, 3, or 4 mutations, e.g., substitutions, additions, or deletions), a VLCDR2 amino acid sequence of SEQ ID NO: 67 (or a sequence with no more than 1, 2, 3, or 4 mutations, e.g., substitutions, additions, or deletions), and/or a VLCDR3 amino acid sequence of SEQ ID NO: 68 (or a sequence with no more than 1, 2, 3, or 4 mutations, e.g., substitutions, additions, or deletions).

[0062] In some embodiments, the second antigen binding domain comprises: (a) a heavy chain variable region (VH) and/or a light chain variable region (VL), wherein: (i) the VH comprises the amino acid sequence of SEQ ID NO: 15 (or an amino acid sequence having at least about 77%, 80%, 85%, 90%, 95%, or 99% sequence identity thereto), and/or (ii) the VL comprises the amino acid sequence of SEQ ID NO: 16 (or an amino acid sequence having at least about 77%, 80%, 85%, 90%, 95%, or 99% sequence identity thereto); and/or (b) a heavy chain variable region (VH) and/or a light chain variable region (VL), wherein: (i) the VH comprises: the amino acid sequence of SEQ ID NO: 23 (or an amino acid sequence having at least about 77%, 80%, 85%, 90%, 95%, or 99% sequence identity thereto), the amino acid sequence of SEQ ID NO: 24 (or an amino acid sequence having at least about 77%, 80%, 85%, 90%, 95%, or 99% sequence identity thereto), or the amino acid sequence of SEQ ID NO: 25 (or an amino acid sequence having at least about 77%, 80%, 85%, 90%, 95%, or 99% sequence identity thereto); and/or (ii) the VL comprises: the amino acid sequence of SEQ ID NO: 26 (or an amino acid sequence having at least about 77%, 80%, 85%, 90%, 95%, or 99% sequence identity thereto), the amino acid sequence of SEQ ID NO: 27 (or an amino acid sequence having at least about 77%, 80%, 85%, 90%, 95%, or 99% sequence identity thereto), the amino acid sequence of SEQ ID NO: 28 (or an amino acid sequence having at least about 77%, 80%, 85%, 90%, 95%, or 99% sequence identity thereto), the amino acid sequence of SEQ ID NO: 29 (or an amino acid sequence having at least about 77%, 80%, 85%, 90%, 95%, or 99% sequence identity thereto), or the amino acid sequence of SEQ ID NO: 30 (or an amino acid sequence having at least about 77%, 80%, 85%, 90%, 95%, or 99% sequence identity thereto).

[0063] In some embodiments, the multifunctional molecule as described herein comprises: a first polypeptide comprising, e.g., from N-terminus to C-terminus, a first VL and a first CL, a second polypeptide comprising, e.g., from N-terminus to C-terminus, a first VH, a first CH1, a first dimerization domain (e.g., a first Fc), and a first moiety that binds to TCR (e.g., TCRVβ) (e.g., a first scFv that binds to TCR (e.g., TCRVβ), a third polypeptide comprising, e.g., from N-terminus to C-terminus, a second VH, a second CH1, a second dimerization domain (e.g., a second Fc), and optionally a second moiety that binds to TCR (e.g., TCRVβ) (e.g., a second scFv that binds to TCR (e.g., TCRV 0), a fourth polypeptide comprising, e.g., from N-terminus to C-terminus, a second VL and a second CL, wherein: the first VL and the first VH form a first antigen binding domain that binds to a first calreticulin protein, and the second VL and the second VH form a third antigen binding domain that binds to a second calreticulin protein, optionally wherein the first and second calreticulin proteins comprise the amino acid sequence of SEQ ID NO: 6285, 1001, or 6286, optionally wherein the first and second calreticulin mutant proteins are each independently chosen from: a molecule comprising the amino acid sequence of SEQ ID NO: 6313, or a molecule comprising the amino acid sequence of SEQ ID NO: 6314, optionally wherein the multifunctional molecule comprises the configuration of FIG. 3A or 3B.

[0064] In some embodiments, the second antigen binding domain binds to NKp30.

[0065] In some embodiments, the second antigen binding domain is chosen from an antibody molecule, e.g., an antigen binding domain, or ligand that binds to (e.g., activates) NKp30, e.g., the second antigen binding domain is an antibody molecule or ligand that binds to (e.g., activates) NKp30.

[0066] In some embodiments, the second antigen binding domain comprises: a heavy chain variable region (VH) comprising a heavy chain complementarity determining region 1 (VHCDR1) having an amino acid sequence of a VHCDR1 of Table 7, Table 35, Table 9, Table 10, or Table 34 (or a sequence with no more than 1, 2, 3, or 4 mutations, e.g., substitutions, additions, or deletions), a VHCDR2 having an amino acid sequence of a VHCDR2 of Table 7, Table 35, Table 9, Table 10, or Table 34 (or a sequence with no more than 1, 2, 3, or 4 mutations, e.g., substitutions, additions, or deletions), and/or a VHCDR3 having an amino acid sequence of a VHCDR3 of Table 7, Table 35, Table 9, Table 10, or Table 34 (or a sequence with no more than 1, 2, 3, or 4 mutations, e.g., substitutions, additions, or deletions), and/or (ii) a light chain variable region (VL) comprising a light chain complementarity determining region 1 (VLCDR1) having an amino acid sequence of a VLCDR1 of Table 8, Table 36, Table 9, Table 10, or Table 34 (or a sequence with no more than 1, 2, 3, or 4 mutations, e.g., substitutions, additions, or deletions), a VLCDR2 having an amino acid sequence of a VLCDR2 of Table 8, Table 36, Table 9, Table 10, or Table 34 (or a sequence with no more than 1, 2, 3, or 4 mutations, e.g., substitutions, additions, or deletions), and/or a VLCDR3 having an amino acid sequence of a VLCDR3 of Table 8, Table 36, Table 9, Table 10, or Table 34 (or a sequence with no more than 1, 2, 3, or 4 mutations, e.g., substitutions, additions, or deletions).

[0067] In some embodiments, the second antigen binding domain comprises: (i) a heavy chain variable region (VH) comprising a heavy chain complementarity determining region 1 (VHCDR1) amino acid sequence of SEQ ID NO: 7313 (or a sequence with no more than 1, 2, 3, or 4 mutations, e.g., substitutions, additions, or deletions), a VHCDR2 amino acid sequence of SEQ ID NO: 6001 (or a sequence with no more than 1, 2, 3, or 4 mutations, e.g., substitutions, additions, or deletions, and/or a VHCDR3 amino acid sequence of SEQ ID NO: 7315 (or a sequence with no more than 1, 2, 3, or 4 mutations, e.g., substitutions, additions, or deletions; and/or (ii) a light chain variable region (VL) comprising a light chain complementarity determining region 1 (VLCDR1) amino acid sequence of SEQ ID NO: 7326 (or a sequence with no more than 1, 2, 3, or 4 mutations, e.g., substitutions, additions, or deletions), a VLCDR2 amino acid sequence of SEQ ID NO: 7327 (or a sequence with no more than 1, 2, 3, or 4 mutations, e.g., substitutions, additions, or deletions), and/or a VLCDR3 amino acid sequence of SEQ ID NO: 7329 (or a sequence with no more than 1, 2, 3, or 4 mutations, e.g., substitutions, additions, or deletions).

[0068] In some embodiments, the second antigen binding domain comprises: (i) a VH comprising the amino acid sequence of any of SEQ ID NOs: 7298 or 7300-7304 (or an amino acid sequence having at least about 75%, 80%, 85%, 90%, 95%, or 99% sequence identity to any of SEQ ID NOs: 7298 or 7300-7304); and/or (ii) a VL comprising the amino acid sequence of any of SEQ ID NOs: 7299 or 7305-7309 (or an amino acid sequence having at least about 93%, 95%, or 99% sequence identity to any of SEQ ID NOs: 7299 or 7305-7309).

[0069] In some embodiments, the second antigen binding domain comprises: (i) a VH comprising the amino acid sequence of SEQ ID NO: 7302 (or an amino acid sequence having at least about 75%, 80%, 85%, 90%, 95%, or 99% sequence identity to 7302), and a VL comprising the amino acid sequence of SEQ ID NO: 7305 (or an amino acid sequence having at least about 75%, 80%, 85%, 90%, 95%, or 99% sequence identity to 7305); or (ii) a VH comprising the amino acid sequence of SEQ ID NO: 7302 (or an amino acid sequence having at least about 75%, 80%, 85%, 90%, 95%, or 99% sequence identity to 7302), and a VL comprising the amino acid sequence of SEQ ID NO: 7309 (or an amino acid sequence having at least about 75%, 80%, 85%, 90%, 95%, or 99% sequence identity to 7309).

[0070] In some embodiments, the second antigen binding domain comprises: (i) an amino acid sequence of SEQ ID NO: 7310 (or an amino acid sequence having at least about 75%, 80%, 85%, 90%, 95%, or 99% sequence identity to 7310); or (ii) an amino acid sequence of SEQ ID NO: 7311 (or an amino acid sequence having at least about 75%, 80%, 85%, 90%, 95%, or 99% sequence identity to 7311).

[0071] In some embodiments, the second antigen binding domain comprises: (i) a heavy chain variable region (VH) comprising a heavy chain complementarity determining region 1 (VHCDR1) amino acid sequence of SEQ ID NO: 6000, a VHCDR2 amino acid sequence of SEQ ID NO: 6001, and/or a VHCDR3 amino acid sequence of SEQ ID NO: 6002, and (ii) a light chain variable region (VL) comprising a light chain complementarity determining region 1 (VLCDR1) amino acid sequence of SEQ ID NO: 6063, a VLCDR2 amino acid sequence of SEQ ID NO: 6064, and/or a VLCDR3 amino acid sequence of SEQ ID NO: 7293.

[0072] In some embodiments, the second antigen binding domain comprises: (1) a heavy chain variable region (VH) comprising a heavy chain framework region 1 (VHFWR1) having an amino acid sequence of a VHFWR1 of Table 7, Table 35, Table 9, Table 10, or Table 34 (or a sequence with no more than 1, 2, 3, 4, 5, or 6 mutations, e.g., substitutions, additions, or deletions, therefrom), a VHFWR2 having an amino acid sequence of a VHFWR2 of Table 7, Table 35, Table 9, Table 10, or Table 34 (or a sequence with no more than 1, 2, 3, 4, 5, or 6 mutations, e.g., substitutions, additions, or deletions, therefrom), a VHFWR3 having an amino acid sequence of a VHFWR3 of Table 7, Table 35, Table 9, Table 10, or Table 34 (or a sequence with no more than 1, 2, 3, 4, 5, or 6 mutations, e.g., substitutions, additions, or deletions, therefrom), or a VHFWR4 having an amino acid sequence of a VHFWR4 of Table 7, Table 35, Table 9, Table 10, or Table 34 (or a sequence with no more than 1, 2, 3, 4, 5, or 6 mutations, e.g., substitutions, additions, or deletions, therefrom), and/or (2) a light chain variable region (VL) comprising a light chain framework region 1 (VLFWR1) having an amino acid sequence of a VLFWR1 of Table 8, Table 36, Table 9, Table 10, or Table 34 (or a sequence with no more than 1, 2, 3, 4, 5, or 6 mutations, e.g., substitutions, additions, or deletions, therefrom), a VLFWR2 having an amino acid sequence of a VLFWR2 of Table 8, Table 36, Table 9, Table 10, or Table 34 (or a sequence with no more than 1, 2, 3, 4, 5, or 6 mutations, e.g., substitutions, additions, or deletions, therefrom), a VLFWR3 having an amino acid sequence of a VLFWR3 of Table 8, Table 36, Table 9, Table 10, or Table 34 (or a sequence with no more than 1, 2, 3, 4, 5, or 6 mutations, e.g., substitutions, additions, or deletions, therefrom), or a VLFWR4 having an amino acid sequence of a VLFWR4 of Table 8, Table 36, Table 9, Table 10, or Table 34 (or a sequence with no more than 1, 2, 3, 4, 5, or 6 mutations, e.g., substitutions, additions, or deletions, therefrom).

[0073] In some embodiments, the second antigen binding domain comprises: (1) a heavy chain variable region (VH) comprising a heavy chain framework region 1 (VHFWR1) amino acid sequence of SEQ ID NO: 6003, a VHFWR2 amino acid sequence of SEQ ID NO: 6004, a VHFWR3 amino acid sequence of SEQ ID NO: 6005, or a VHFWR4 amino acid sequence of SEQ ID NO: 6006, and (3) a light chain variable region (VL) comprising a light chain framework region 1 (VLFWR1) amino acid sequence of SEQ ID NO: 6066, a VLFWR2 amino acid sequence of SEQ ID NO: 6067, a VLFWR3 amino acid sequence of SEQ ID NO: 7292, or a VLFWR4 amino acid sequence of SEQ ID NO: 6069.

[0074] In some embodiments, the second antigen binding domain comprises: (i) a VH comprising the amino acid sequence of a VH of Table 7, Table 35, Table 9, Table 10, or Table 34 (or an amino acid sequence having at least about 75%, 80%, 85%, 90%, 95%, or 99% sequence identity thereto), and/or (ii) a VL comprising the amino acid sequence of a VL of Table 8, Table 36, Table 9, Table 10, or Table 34 (or an amino acid sequence having at least about 93%, 95%, or 99% sequence identity thereto).

[0075] In some embodiments, the second antigen binding domain comprises a heavy chain comprising the amino acid sequence of a heavy chain of Table 10 (or an amino acid sequence having at least about 75%, 80%, 85%, 90%, 95%, or 99% sequence identity thereto).

[0076] In some embodiments, the second antigen binding domain comprises a light chain comprising the amino acid sequence of a light chain of Table 10 (or an amino acid sequence having at least about 75%, 80%, 85%, 90%, 95%, or 99% sequence identity thereto).

[0077] In some embodiments, the second antigen binding domain comprises a heavy chain comprising the amino acid sequence of a heavy chain of Table 10 (or an amino acid sequence having at least about 75%, 80%, 85%, 90%, 95%, or 99% sequence identity thereto), and a light chain comprising the amino acid sequence of a light chain of Table 10 (or an amino acid sequence having at least about 75%, 80%, 85%, 90%, 95%, or 99% sequence identity thereto).

[0078] In some embodiments, the multifunctional molecule as described herein comprises: a first polypeptide comprising, e.g., from N-terminus to C-terminus, a first VL and a first CL, a second polypeptide comprising, e.g., from N-terminus to C-terminus, a first VH, a first CH1, a first dimerization domain (e.g., a first Fc), and a first moiety that binds to NKp30 (e.g., a first antibody molecule or ligand that binds to NKp30), a third polypeptide comprising, e.g., from N-terminus to C-terminus, a second VH, a second CH1, a second dimerization domain (e.g., a second Fc), and optionally a second moiety that binds to NKp30 (e.g., a second antibody molecule or ligand that binds to NKp30), a fourth polypeptide comprising, e.g., from N-terminus to C-terminus, a second VL and a second CL, wherein: the first VL and the first VH form a first antigen binding domain that binds to a first calreticulin protein, and the second VL and the second VH from a third antigen binding domain that binds to a second calreticulin protein, optionally wherein the first and second calreticulin proteins comprise the amino acid sequence of SEQ ID NO: 6285, 1001, or 6286, optionally wherein the first and second calreticulin mutant proteins are each independently chosen from: a molecule comprising the amino acid sequence of SEQ ID NO: 6313, or a molecule comprising the amino acid sequence of SEQ ID NO: 6314, optionally wherein the multifunctional molecule comprises the configuration of FIG. 3A or 3B.

[0079] In some embodiments, the calreticulin protein comprises an amino acid sequence chosen from SEQ ID NOs: 6285-6312 or 1001, optionally wherein the calreticulin protein comprises an amino acid sequence chosen from SEQ ID NOs: 6313-6346 or 1002-1003.

[0080] In some embodiments, the calreticulin protein comprises the amino acid sequence of SEQ ID NO: 6285 or 1001.

[0081] In some embodiments, the calreticulin protein comprises the amino acid sequence of SEQ ID NO: 6286.

[0082] In some embodiments, the first antigen binding domain binds to an epitope located within the C-terminus of the calreticulin protein, optionally wherein the first antigen binding domain binds to an epitope located within the amino acid sequence of SEQ ID NO: 6285, 1001, or 6286.

[0083] In some embodiments, the multifunctional molecule as described herein further comprises a third antigen binding domain that binds to a second calreticulin protein, e.g., wherein the second calreticulin mutant protein comprises the amino acid sequence of SEQ ID NO: 6285, 1001, or 6286, optionally wherein: (i) the third antigen binding domain is different from the first antigen binding domain, or (ii) the third antigen binding domain is the same as the first antigen binding domain.

[0084] In some embodiments, the second calreticulin molecule is the same as the calreticulin molecule bound by the first antigen binding domain.

[0085] In some embodiments, the second calreticulin molecule is different from the calreticulin molecule bound by the first antigen binding domain.

[0086] In some embodiments, the second calreticulin protein comprises an amino acid sequence chosen from SEQ ID NOs: 6285-6312 or 1001, optionally wherein the second calreticulin protein comprises an amino acid sequence chosen from SEQ ID NOs: 6313-6346 or 1002-1003.

[0087] In some embodiments, the calreticulin protein bound by the first antigen binding domain comprises the amino acid sequence of SEQ ID NO: 6285 or 1001, and the second calreticulin protein comprises the amino acid sequence of SEQ ID NO: 6286.

[0088] In some embodiments, the third antigen binding domain binds to an epitope located within the C-terminus of the second calreticulin protein, optionally wherein the third antigen binding domain binds to an epitope located within the amino acid sequence of SEQ ID NO: 6285, 1001, or 6286.

[0089] In some embodiments, the first antigen binding domain comprises: (i) a heavy chain variable region (VH) comprising a heavy chain complementarity determining region 1 (VHCDR1) having an amino acid sequence of a VHCDR1 in Table 4, Table 24, Table 25, or Table 17 (or a sequence with no more than 1, 2, 3, or 4 mutations, e.g., substitutions, additions, or deletions), a VHCDR2 having an amino acid sequence of a VHCDR2 in Table 4, Table 24, Table 25, or Table 17 (or a sequence with no more than 1, 2, 3, or 4 mutations, e.g., substitutions, additions, or deletions), and/or a VHCDR3 having an amino acid sequence of a VHCDR3 in Table 4, Table 24, Table 25, or Table 17 (or a sequence with no more than 1, 2, 3, or 4 mutations, e.g., substitutions, additions, or deletions); (ii) a light chain variable region (VL) comprising a light chain complementarity determining region 1 (VLCDR1) having an amino acid sequence of a VLCDR1 in Table 5, Table 24, Table 25, or Table 18 (or a sequence with no more than 1, 2, 3, or 4 mutations, e.g., substitutions, additions, or deletions), a VLCDR2 having an amino acid sequence of a VLCDR2 in Table 5, Table 24, Table 25, or Table 18 (or a sequence with no more than 1, 2, 3, or 4 mutations, e.g., substitutions, additions, or deletions), and/or a VLCDR3 having an amino acid sequence of a VLCDR3 in Table 5, Table 24, Table 25, or Table 18 (or a sequence with no more than 1, 2, 3, or 4 mutations, e.g., substitutions, additions, or deletions); (iii) a VH comprising the amino acid sequence of a VH in Table 24, Table 25, or Table 16 (or an amino acid sequence having at least about 77%, 80%, 85%, 90%, 95%, or 99% sequence identity thereto); (iv) a VL comprising the amino acid sequence of a VL in Table 24, Table 25, or Table 16 (or an amino acid sequence having at least about 93%, 95%, or 99% sequence identity thereto); (v) a VH comprising a heavy chain framework region 1 (VHFWR1) having an amino acid sequence of a VHFWR1 in Table 4 or Table 6 (or a sequence with no more than 1, 2, 3, 4, 5, 6, 7, 8, or 9 mutations, e.g., substitutions, additions, or deletions), a VHFWR2 having an amino acid sequence of a VHFWR2 in Table 4 or Table 6 (or a sequence with no more than 1, 2, 3, 4, 5, 6, 7, 8, or 9 mutations, e.g., substitutions, additions, or deletions), a VHFWR3 having an amino acid sequence of a VHFWR3 in Table 4 or Table 6 (or a sequence with no more than 1, 2, 3, 4, 5, 6, 7, 8, or 9 mutations, e.g., substitutions, additions, or deletions), and/or a VHFWR4 having an amino acid sequence of a VHFWR4 in Table 4 or Table 6 (or a sequence with no more than 1, 2, 3, 4, 5, 6, 7, 8, or 9 mutations, e.g., substitutions, additions, or deletions), and/or (vi) a VL comprising a light chain framework region 1 (VLFWR1) having an amino acid sequence of a VLFWR1 in Table 5 or Table 6 (or a sequence with no more than 1, 2, 3, 4, 5, 6, 7, 8, or 9 mutations, e.g., substitutions, additions, or deletions), a VLFWR2 having an amino acid sequence of a VLFWR2 in Table 5 or Table 6 (or a sequence with no more than 1, 2, 3, 4, 5, 6, 7, 8, or 9 mutations, e.g., substitutions, additions, or deletions), a VLFWR3 having an amino acid sequence of a VLFWR3 in Table 5 or Table 6 (or a sequence with no more than 1, 2, 3, 4, 5, 6, 7, 8, or 9 mutations, e.g., substitutions, additions, or deletions), and/or a VLFWR4 having an amino acid sequence of a VLFWR4 in Table 5 or Table 6 (or a sequence with no more than 1, 2, 3, 4, 5, 6, 7, 8, or 9 mutations, e.g., substitutions, additions, or deletions).

[0090] In some embodiments, the multifunctional molecule further comprises a tumor-targeting moiety.

[0091] In some embodiments, the tumor-targeting moiety binds to a tumor antigen.

[0092] In some embodiments, the tumor antigen is selected from G6B, CD34, CD41, P-selectin, Clec2, cKIT, FLT3, MPL, ITGB3, ITGB2, GP5, GP6, GP9, GP1BA, DSC2, FCGR2A, TNFRSF10A, TNFRSF10B, or TM4SF1.

[0093] In some embodiments, the tumor-targeting moiety comprises an antibody molecule, e.g., that binds to a tumor antigen selected from G6B, CD34, CD41, P-selectin, Clec2, cKIT, FLT3, MPL, ITGB3, ITGB2, GP5, GP6, GP9, GP1BA, DSC2, FCGR2A, TNFRSF10A, TNFRSF10B, or TM4SF1.

[0094] In some embodiments, the tumor-targeting moiety comprises a VH and/or VL sequence, e.g., as listed in Table 38 or Table 20.

[0095] In some embodiments, the multifunctional molecule preferentially binds to a myeloproliferative neoplasm cell over a non-tumor cell, optionally wherein the binding between the multifunctional molecule and the myeloproliferative neoplasm cell is more than 10, 20, 30, 40, 50-fold greater than the binding between the multifunctional molecule and a non-tumor cell.

[0096] In some embodiments, the myeloproliferative neoplasm cell is chosen from a myelofibrosis cell, an essential thrombocythemia cell, a polycythemia vera cell, or a chronic myeloid cancer cell, optionally wherein: the myeloproliferative neoplasm cell does not comprise a JAK2 V617F mutation, or the myeloproliferative neoplasm cell does not comprise a MPL mutation.

[0097] In some embodiments, the multifunctional molecule as described herein further comprises a linker, e.g., a linker between the first antigen binding domain and the second antigen binding domain.

[0098] In some embodiments, the linker is chosen from: a cleavable linker, a non-cleavable linker, a peptide linker, a flexible linker, a rigid linker, a helical linker, or a non-helical linker.

[0099] In some embodiments, the linker is a peptide linker.

[0100] In some embodiments, the peptide linker comprises Gly and Ser.

[0101] In some embodiments, the peptide linker comprises an amino acid sequence chosen from SEQ ID NOs: 6214-6217 or 6220-6221 and 77-78.

[0102] In another aspect, provides herein is a nucleic acid molecule encoding the multifunctional molecule as described herein.

[0103] In another aspect, provides herein is a vector, e.g., an expression vector, comprising the nucleic acid molecule as described herein.

[0104] In another aspect, provides herein is a cell comprising the nucleic acid molecule as described herein or the vector as described herein.

[0105] In another aspect, provides herein is a method of making, e.g., producing, the multifunctional molecule as described herein, comprising culturing the cell as described herein, under suitable conditions, e.g., conditions suitable for gene expression and/or homo- or heterodimerization.

[0106] In another aspect, provides herein is a pharmaceutical composition comprising the composition as described herein, the multifunctional molecule as described herein, the nucleic acid molecule as described herein, the vector as described herein, or the cell as described herein, and a pharmaceutically acceptable carrier, excipient, diluent, or stabilizer.

[0107] In another aspect, provides herein is a method of treating a cancer, comprising administering to a subject in need thereof the composition as described herein, the multifunctional molecule as described herein, the nucleic acid molecule as described herein, the vector as described herein, the cell as described herein, or the pharmaceutical composition as described herein, wherein the multifunctional molecule is administered in an amount effective to treat the cancer.

[0108] In another aspect, provides herein is a use of the composition as described herein, the multifunctional molecule as described herein, the nucleic acid molecule as described herein, the vector as described herein, or the cell as described herein for the manufacture of a medicament for treating a cancer.

[0109] In some embodiments, the subject has cancer cells that express the first and/or second calreticulin protein.

[0110] In some embodiments, the subject has the JAK2 V617F mutation.

[0111] In some embodiments, the subject does not have the JAK2 V617F mutation.

[0112] In some embodiments, the subject has a MPL mutation.

[0113] In some embodiments, the subject does not have a MPL mutation.

[0114] In some embodiments, the cancer is a hematological cancer, optionally wherein the cancer is a myeloproliferative neoplasm, e.g., primary or idiopathic myelofibrosis (MF), essential thrombocytosis (ET), polycythemia vera (PV), or chronic myelogenous leukemia (CML), optionally wherein the cancer is myelofibrosis.

[0115] In some embodiments, the cancer is a solid tumor cancer.

[0116] In some embodiments, the method as described herein or the use as described herein further comprises administering a second therapeutic treatment.

[0117] In some embodiments, the second therapeutic treatment comprises a therapeutic agent (e.g., a chemotherapeutic agent, a biologic agent, hormonal therapy), radiation, or surgery.

[0118] In some embodiments, the therapeutic agent is selected from: a chemotherapeutic agent, or a biologic agent.

[0119] In another aspect, provides herein is a method of detecting calreticulin (e.g., wild-type and/or mutant calreticulin) in a sample or subject, comprising: contacting the sample or subject with an anti-calreticulin (e.g., wild-type and/or mutant calreticulin) antibody molecule described herein; and detecting formation of a complex between the antibody molecule and the sample or subject, thereby detecting calreticulin (e.g., wild-type and/or mutant calreticulin).

[0120] In some embodiments, calreticulin (e.g., wild-type and/or mutant calreticulin) is detected in vitro or in vivo.

[0121] In some embodiments, the method as described herein further comprises contacting a reference sample or subject with the antibody molecule; and detecting formation of a complex between the antibody molecule and the reference sample or subject, wherein a change, e.g., a statistically significant change, in the formation of the complex in the sample or subject, relative to the reference sample or subject is indicative of the presence of calreticulin (e.g., wild-type and/or mutant calreticulin) in the sample or subject.

[0122] In some embodiments, the method as described herein further comprises obtaining a sample from a subject.

[0123] In some embodiments, sample comprises one or more of plasma, tissue (e.g., cancerous tissue), biopsy, blood (e.g., whole blood), PBMCs, bone marrow, and/or lymphatic tissue, e.g., lymph node.

[0124] In some embodiments, the sample has not been frozen and/or fixed.

[0125] In some embodiments, the sample has been frozen (e.g., snap frozen) and/or fixed (e.g., formalin-fixed paraffin-embedded (FFPE)).

[0126] In some embodiments, the subject has, or is at risk of having, a disease or disorder described herein (e.g., cancer, e.g., myelofibrosis).

[0127] In some embodiments, the method as described herein further comprises performing a flow analysis, e.g., using a multi-panel method.

[0128] In some embodiments, the method as described herein further comprises assessing T-cell clonality, e.g., to determine the presence and/or level of T cell malignancy.

[0129] In some embodiments, the method as described herein further comprises measuring the level of calreticulin+(e.g., wild-type calreticulin+ and/or mutant calreticulin+) cells from the biological sample (e.g., determining if the calreticulin+ cells are depleted, e.g., relative to a reference sample or subject).

[0130] In some embodiments, the method as described herein further comprises measuring the intracellular level of calreticulin (e.g., wild-type and/or mutant calreticulin).

[0131] In some embodiments, the method as described herein further comprises measuring the membrane level of calreticulin (e.g., wild-type and/or mutant calreticulin).

[0132] In some embodiments, the method as described herein further comprises evaluating the subject for a change in prognosis, severity, or presence or absence of a disease or disorder (e.g., cancer, e.g., myelofibrosis), e.g., after treatment (e.g., with an antibody molecule described herein).

[0133] In some embodiments, the antibody molecule is detectably labeled.

[0134] In another aspect, provides herein is a method of evaluating a subject, comprising: contacting a sample (e.g., a sample described herein) from the subject with an anti-calreticulin (e.g., wild-type and/or mutant calreticulin) antibody molecule described herein; and detecting formation of a complex between the antibody molecule and the sample, thereby evaluating the subject.

[0135] In some embodiments, the subject has, or is at risk of having, a disease or disorder described herein (e.g., cancer, e.g., myelofibrosis).

[0136] In some embodiments, the subject has not been treated with an antibody molecule described herein.

[0137] In some embodiments, the subject has been treated with an antibody molecule described herein.

[0138] In another aspect, provides herein is a kit comprising an anti-calreticulin (e.g., wild-type and/or mutant calreticulin) antibody molecule described herein and instructions for use in a method of detecting calreticulin (e.g., wild-type and/or mutant calreticulin) in a sample or subject.

[0139] Those skilled in the art will recognize, or be able to ascertain using no more than routine experimentation, many equivalents to the specific embodiments of the invention described herein. Such equivalents are intended to be encompassed by the following embodiments.

[0140] Unless otherwise defined, all technical and scientific terms used herein have the same meaning as commonly understood by one of ordinary skill in the art to which this invention belongs. Although methods and materials similar or equivalent to those described herein can be used in the practice or testing of the present invention, suitable methods and materials are described below. All publications, patent applications, patents, and other references mentioned herein are incorporated by reference in their entirety. In the case of conflict, the present specification, including definitions, will control. In addition, the materials, methods, and examples are illustrative only and are not intended to be limiting.

[0141] Other features and advantages of the invention will be apparent from the following detailed description and claims.

### BRIEF DESCRIPTION OF THE DRAWINGS

[0142] The patent or application file contains at least one drawing executed in color. Copies of this patent or patent application publication with color drawing(s) will be provided by the Office upon request and payment of the necessary fee.

[0143] FIGS. 1A-1B shows the alignment of the Antibody A source mouse VH and VL framework 1, CDR 1, framework 2, CDR 2, framework 3, CDR3, and framework 4 regions with their respective humanized sequences. Kabat CDRs are shown in bold, Chothia CDRs are shown in italics, and combined CDRs are shown in boxes. The framework positions that were back mutated are double underlined. FIG. 1A shows VH sequences for murine Antibody A (SEQ ID NO: 1) and humanized Antibody A-H (SEQ ID NO: 9). FIG. 1B shows VL sequences for murine Antibody A (SEQ ID NO: 2) and humanized Antibody A-H (SEQ ID NO: 10 and SEQ ID NO: 11).

[0144] FIGS. 2A-2B shows the alignment of the Antibody B source mouse VH and VL framework 1, CDR 1, framework 2, CDR 2, framework 3, CDR3, and framework 4 regions with their respective humanized sequences. Kabat CDRs are shown in bold, Chothia CDRs are shown in italics, and combined CDRs are shown in boxes. The framework positions that were back mutated are double underlined. FIG. 2A shows the VH sequence for murine Antibody B (SEQ ID NO: 15) and humanized VH sequences B-H. 1A to B-H.1C (SEQ ID NOs: 23-25). FIG. 2B shows the VL sequence for murine Antibody B (SEQ ID NO: 16) and humanized VL sequences B-H.1D to B-H.1H (SEQ ID NOs: 26-30).

[0145] FIG. 3 depicts the phylogenetic tree of TCRBV gene family and subfamilies with corresponding antibodies mapped. Subfamily identities are as follows: Subfamily A: TCRβ V6; Subfamily B: TCRβ V10; Subfamily C: TCRβ V12; Subfamily D: TCRβ V5; Subfamily E: TCRβ V7; Subfamily F: TCRβ V11; Subfamily G: TCRβ V14; Subfamily H: TCRβ V16; Subfamily I: TCRβ V18; Subfamily J: TCRβ V9; Subfamily K: TCRβ V13; Subfamily L: TCRβ V4; Subfamily M: TCRβ V3; Subfamily N: TCRβ V2; Subfamily O: TCRβ V15; Subfamily P: TCRβ V30; Subfamily Q: TCRβ V19; Subfamily R: TCRβ V27; Subfamily S: TCRβ V28; Subfamily T: TCRβ V24; Subfamily U: TCRβ V20; Subfamily V: TCRβ V25; and Subfamily W: TCRβ V29 subfamily. Subfamily members are described in detail herein in the Section titled “TCR beta V (TCRβV)”.

[0146] FIGS. 4A-4C show human CD3+ T cells activated by anti-TCR Vβ13.1 antibody (A-H.1) for 6-days. Human CD3+ T cells were isolated using magnetic-bead separation (negative selection) and activated with immobilized (plate-coated) anti-TCR Vβ13.1 (A-H.1) or anti-CD3 E (OKT3) antibodies at 100 nM for 6 days. FIG. 4A shows two scatter plots (left: activated with OKT3; and right: activated with A-H.1) of expanded T cells assessed for TCR Vβ13.1 surface expression using anti-TCR Vβ13.1 (A-H.1) followed by a secondary fluorochrome-conjugated antibody for flow cytometry analysis. FIG. 4B shows percentage (%) of TCR Vβ13.1 positive T cells activated by anti-TCR Vβ13.1 (A-H.1) or anti-CD3e (OKT3) plotted against total T cells (CD3+). FIG. 4C shows relative cell count acquired by counting the number of events in each T cell subset gate (CD3 or TCR Vβ13.1) for 20 seconds at a constant rate of 60 μl/min. Data shown as mean value from 3 donors.

[0147] FIGS. 5A-5B show cytolytic activity of human CD3+ T cells activated by anti-TCR Vβ13.1 antibody (A-H.1) against transformed cell line RPMI 8226. FIG. 5A depicts target cell lysis of human CD3+ T cells activated with A-H.1 or OKT3. Human CD3+ T cells were isolated using magnetic-bead separation (negative selection) and activated with immobilized (plate-coated) A-H.1 or OKT3 at the indicated concentrations for 4 days prior to co-culture with RPMI 8226 cells at a (E:T) ratio of 5:1 for 2 days. Samples were next analyzed for cell lysis of RPMI 8226 cells by FACS staining for CFSE/CD138-labeled, and membrane-impermeable DNA dyes (DRAQ7) using flow cytometry analysis. FIG. 5B shows target cell lysis of human CD3+ T cells activated with A-H.1 or OKT3 incubated with RPMI-8226 at a (E:T) ratio of 5:1 for 6 days followed by cell lysis analysis of RPMI 8226 cells as described above. Percentage (%) target cell lysis was determined by normalizing to basal target cell lysis (i.e. without antibody treatment) using the following formula, [(x−basal)/(100%−basal), where x is cell lysis of sample]. Data shown is a representative of n=1 donor.

[0148] FIGS. 6A-6B show IFNg production by human PBMCs activated with the indicated antibodies. Human PBMCs were isolated from whole blood from the indicated number of donors, followed by solid-phase (plate-coated) stimulation with the indicated antibodies at 100 Nm. Supernatant was collected on Days 1, 2, 3, 5, or 6. FIG. 6A is a graph comparing the production of IFNg in human PBMCs activated with the antibodies indicated activated with anti-TCR Vβ13.1 antibodies (A-H.1 or A-H.2) or anti-CD3e antibodies (OKT3 or SP34-2) on Day 1, 2, 3, 5, or 6 post-activation. FIG. 6B shows IFNg production in human PBMCs activated with the antibodies indicated activated with the indicated anti-TCR Vβ13.1 antibodies or anti-CD3e antibody (OKT3) on Day 1, 2, 3, 5, or 6 post-activation.

[0149] FIGS. 7A-7B show IL-2 production by human PBMCs activated with the indicated antibodies. A similar experimental setup as described for FIGS. 6A-6B was used.

[0150] FIGS. 8A-8B show IL-6 production by human PBMCs activated with the indicated antibodies. A similar experimental setup as described for FIGS. 6A-6B was used.

[0151] FIGS. 9A-9B show TNF-alpha production by human PBMCs activated with the indicated antibodies. A similar experimental setup as described for FIGS. 6A-6B was used.

[0152] FIGS. 10A-10B show IL-1beta production by human PBMCs activated with the indicated antibodies. A similar experimental setup as described for FIGS. 6A-6B was used.

[0153] FIGS. 11A-11B are graphs showing delayed kinetics of IFNg secretion in human PMBCs activated by anti-TCR Vβ13.1 antibody A-H.1 when compared to PBMCs activated by anti-CD3e antibody OKT3. FIG. 11A shows IFNg secretion data from 4 donors. FIG. 11B shows IFNg secretion data from 4 additional donors. Data shown is representative of n=8 donors.

[0154] FIG. 12 depicts increased CD8+ TSCM and Temra T cell subsets in human PBMCs activated by anti-TCR Vβ13.1 antibodies (A-H.1 or A-H.2) compared to PBMCs activated by anti-CD3e antibodies (OKT3 or SP34-2).

[0155] FIGS. 13A-13F show characterization of an anti-TCRVb antibody. FIG. 13A is a graph depicting proliferation of T cells activated with anti-CD3 (OKT3) antibody or anti-TCRVb antibody. FIG. 13B shows selective expansion of CD45RA+ effector memory CD8+ and CD4+ T cells (TEMRA) cells with anti-TCRVb antibodies. Tn=naïve T cell; Tscm=stem cell memory T cell; Tcm=central memory T cell; Tem=effector memory T cell; Temra=effector memory CD45RA+ T cell. FIG. 13C is a graph showing IFN-g secretion by PBMCs stimulated with an anti-TCRVb antibody, or anti-CD3 antibodies. FIG. 13D shows target cell lysis by T cells stimulated with an anti-TCRVb antibody, or anti-CD3 antibodies. Cells were stimulated for 4 days followed by 2 days incubation with multiple myeloma target cells for assessment of cell killing. FIG. 13E is a graph showing perforin secretion by T cells stimulated with an anti-TCRVb antibody, or an anti-CD3 antibody. Perforin was analyzed by FACS staining in TCRVB-positive and TCRVB-negative T cells in PBMCs after 5 days of stimulation with 100 ng/ml plate-bound antibody. FIG. 13F is a graph showing Granzyme B by T cells stimulated with an anti-TCRVb antibody, or an anti-CD3 antibody. Granzyme B was analyzed by FACS staining in TCRVB-positive and TCRVB-negative T cells in PBMCs after 5 days of stimulation with 100 ng/ml plate-bound antibody.

[0156] FIGS. 14A-14B show production of IL-2 and IL-15 and expansion of human NK cells by stimulation of PBMCs with anti-TCRVb antibody for 6 days at a dose of 100 nM. FIG. 14A shows secretion of IL-2 or IL-15 in T cells stimulated with an anti-TCRVb antibody, or anti-CD3 antibodies. FIG. 14B depicts flow cytometry dot plots showing NKp46 staining vs CD56 antibody staining in cells stimulated with an anti-TCRVb antibody or an anti-CD3 antibody or a control sample.

[0157] FIGS. 15A-15C show secretion of cytokines in PBMCs stimulated with an anti-TCRVb antibody, or anti-CD3 antibodies.

[0158] FIGS. 16A-16B show killing of MM cells by dual targeting BCMA-TCRvb antibody molecules. FIG. 16A shows in vitro killing by one of the following dual-targeting antibody molecules: BCMA-TCRVb, BCMA-CD3, or Control-TCRVb; or an isotype control. FIG. 16B shows in vivo killing of MM cells by a dual-targeting BCM-TCRVb antibody.

[0159] FIG. 17 shows lysis of MM target cells with a dual targeting antibody which recognized FcRH5 on one arm and TCRVb on the other arm.

[0160] FIGS. 18A-18C are schematic representations of exemplary formats and configurations of functional moieties attached to a dimerization module, e.g., an immunoglobulin constant domain. FIG. 18A depicts moieties A, B, C and D, covalently linked to a heterodimeric Fc domain. FIG. 18B depicts moieties A, B, C and D, covalently linked to a homodimeric Fc domain. FIG. 18C depicts moieties A, B, C and D, covalently linked to heterodimeric heavy and light constant domains (e.g., a Fab CH₁ and a Fab CL). In some embodiments, the functional moiety is an antigen binding domain that binds to a calreticulin protein (e.g., a wild-type calreticulin protein and/or a calreticulin mutant protein). In some embodiments, the functional moiety is an antigen binding domain that binds to a wild-type calreticulin protein and a calreticulin mutant protein with approximately the same affinity. In some embodiments, the functional moiety is an antigen binding domain that preferentially binds to a calreticulin mutant protein over a wild type calreticulin protein, e.g., wherein the first calreticulin mutant protein comprises the amino acid sequence of SEQ ID NO: 6286 and the wild type calreticulin protein comprises the amino acid sequence of SEQ ID NO: 6285 or 1001. In some embodiments, the functional moiety is an immune cell engager chosen from a T cell engager, an NK cell engager, a B cell engager, a dendritic cell engager, or a macrophage cell engager. In some embodiments, the functional moiety is a cytokine molecule. In some embodiments, the functional moiety is a stromal modifying moiety.

[0161] FIGS. 19A and 19B are schematic representations of exemplary formats and configurations of a multifunctional molecule comprising a first antigen binding domain (e.g., a first Fab) that binds to a calreticulin protein (e.g., a wild-type calreticulin protein and/or a calreticulin mutant protein), a second antigen binding domain (e.g., a second Fab) that binds to a calreticulin protein (e.g., a wild-type calreticulin protein and/or a calreticulin mutant protein), and one or more moieties that bind to CD3 (e.g., an scFv that binds to CD3). In one embodiment, the first antigen binding domain (e.g., the first Fab) binds to a calreticulin protein (e.g., a wild-type calreticulin protein and/or a calreticulin mutant protein) disclosed herein, e.g., a calreticulin mutant protein disclosed in Table 2 or 3, e.g., Type 1 or Type 2 calreticulin mutant protein disclosed in Table 2 or 3, e.g., a calreticulin mutant protein comprising the amino acid sequence of SEQ ID NO: 6113 or 6314. In one embodiment, the second antigen binding domain (e.g., the second Fab) binds to a calreticulin protein (e.g., a wild-type calreticulin protein and/or a calreticulin mutant protein) disclosed herein, e.g., a calreticulin mutant protein disclosed in Table 2 or 3, e.g., Type 1 or Type 2 calreticulin mutant protein disclosed in Table 2 or 3, e.g., a calreticulin mutant protein comprising the amino acid sequence of SEQ ID NO: 6313 or 6314.

[0162] FIGS. 20A and 20B are schematic representations of exemplary formats and configurations of a multifunctional molecule comprising a first antigen binding domain (e.g., a first Fab) that binds to a calreticulin protein (e.g., a wild-type calreticulin protein and/or a calreticulin mutant protein), a second antigen binding domain (e.g., a second Fab) that binds to a calreticulin protein (e.g., a wild-type calreticulin protein and/or a calreticulin mutant protein), and one or more moieties that bind to TCR (e.g., TCR p) (e.g., an scFv that binds to TCR (e.g., TCR P)). In one embodiment, the first antigen binding domain (e.g., the first Fab) binds to a calreticulin protein (e.g., a wild-type calreticulin protein and/or a calreticulin mutant protein) disclosed herein, e.g., a calreticulin mutant protein disclosed in Table 2 or 3, e.g., Type 1 or Type 2 calreticulin mutant protein disclosed in Table 2 or 3, e.g., a calreticulin mutant protein comprising the amino acid sequence of SEQ ID NO: 6313 or 6314. In one embodiment, the second antigen binding domain (e.g., the second Fab) binds to a calreticulin protein (e.g., a wild-type calreticulin protein and/or a calreticulin mutant protein) disclosed herein, e.g., a calreticulin mutant protein disclosed in Table 2 or 3, e.g., Type 1 or Type 2 calreticulin mutant protein disclosed in Table 2 or 3, e.g., a calreticulin mutant protein comprising the amino acid sequence of SEQ ID NO: 6313 or 6314.

[0163] FIGS. 21A and 21B are schematic representations of exemplary formats and configurations of a multifunctional molecule comprising a first antigen binding domain (e.g., a first Fab) that binds to a calreticulin protein (e.g., a wild-type calreticulin protein and/or a calreticulin mutant protein), a second antigen binding domain (e.g., a second Fab) that binds to a calreticulin protein (e.g., a wild-type calreticulin protein and/or a calreticulin mutant protein), and one or more moieties that bind to NKp30 (e.g., an antibody molecule or ligand that binds to NKp30). In one embodiment, the first antigen binding domain (e.g., the first Fab) binds to a calreticulin protein (e.g., a wild-type calreticulin protein and/or a calreticulin mutant protein) disclosed herein, e.g., a calreticulin mutant protein disclosed in Table 2 or 3, e.g., Type 1 or Type 2 calreticulin mutant protein disclosed in Table 2 or 3, e.g., a calreticulin mutant protein comprising the amino acid sequence of SEQ ID NO: 6313 or 6314. In one embodiment, the second antigen binding domain (e.g., the second Fab) binds to a calreticulin protein (e.g., a wild-type calreticulin protein and/or a calreticulin mutant protein) disclosed herein, e.g., a calreticulin mutant protein disclosed in Table 2 or 3, e.g., Type 1 or Type 2 calreticulin mutant protein disclosed in Table 2 or 3, e.g., a calreticulin mutant protein comprising the amino acid sequence of SEQ ID NO: 6313 or 6314.

[0164] FIG. 22 is a graph showing binding of NKp30 antibodies to NK92 cells. Data was calculated as the percent-AF747 positive population.

[0165] FIG. 23 is a graph showing activation of NK92 cells by NKp30 antibodies. Data were generated using hamster anti-NKp30 mAbs.

[0166] FIGS. 24A-24D are schematics showing exemplary multispecific molecules comprising a TGFβ inhibitor. In some embodiments, the TGFβ inhibitor comprises a TGF-beta receptor ECD homodimer. In some embodiments, the TGFβ inhibitor comprises a TGFBR2 ECD heterodimer. In FIGS. 24A and 24B, the two TGFBR ECD domains are linked to the C-terminus of two Fc regions. In some embodiments, the CH1-Fc-TGFBR ECD region shown in FIG. 24A or 24B comprises the amino acid sequence of SEQ ID NO: 6405 or 3193. In some embodiments, the Fc-TGFBR ECD region shown in FIG. 24A or 24B comprises the amino acid sequence of SEQ ID NO: 6407 or 6408. In FIGS. 24C and 24D, the two TGFBR ECD domains are linked to CH1 and CL, respectively. In some embodiments, the TGFBR ECD-CH1-Fc region shown in FIG. 24C or 24D comprises the amino acid sequence of SEQ ID NO: 6409 or 6410. In some embodiments, the TGFBR ECD-CL region shown in FIG. 24C or 24D comprises the amino acid sequence of SEQ ID NO: 6411 or 6412. In some embodiments, the multispecific molecule comprises a binding moiety A and a binding moiety B. In some embodiments, the binding moiety A or binding moiety B is a calreticulin-targeting antigen binding domain disclosed herein.

[0167] FIGS. 25A-25B are a series of graphs showing enzyme-linked immunosorbent assay (ELISA) results showing the level of binding of the parental IgG form of antibody 6C10 (BKM0106) to wild-type calreticulin (CALR WT) and two calreticulin mutants (CALR ins and CALR del, as described herein). FIG. 25A shows ELISA results when the indicated antigen (CALR WT, CALR ins, or CALR del) was coated on the plate. FIG. 25B shows ELISA results when the BKM0106 antibody was coated on the plate.

[0168] FIGS. 26A-26B are a series of graphs showing binding of the parental IgG form of antibody 6C10 (BKM0106) to cells expressing one of two calreticulin mutants (CALR ins and CALR del, as described herein), as assessed by FACS.

[0169] FIG. 27 is a graph showing therapeutic efficacy of various antibody molecules in an in vivo murine model of myelofibrosis. Antibody molecules tested included ADCC-enabled antibody molecules against mutant calreticulin (mtCalR), bispecific antibodies comprising a mtCalR-binding domain and a second binding domain specific to another target (i.e., TCRvβ or CD3) and an LALAPG variant Fc region. Naïve mouse spleen and vehicle were used as controls.

[0170] FIG. 28 is a table showing in vitro binding of exemplary anti-CD3 antibody molecules BKM0020, BKM0025, BKM0028, BKM0038, as described herein, to human CD3e (huCD3e) and cynomolgus CD3e (cCD3e).

[0171] FIG. 29 is a graph showing binding of exemplary anti-CD3 antibody molecule BKM0020, as described herein, to Jurkat cells expressing human CD3e (huCD3e).

[0172] FIGS. 30A and 30B are schematics showing the alignments of affinity matured humanized Antibody A-H sequences. FIG. 30A shows the alignment of affinity matured humanized Antibody A-H VL sequences (SEQ ID NOs: 3377-3389, respectively, in order of appearance). FIG. 30B shows the alignment of affinity matured humanized Antibody A-H VH sequences (SEQ ID NOS 3390-3436, respectively, in order of appearance).

### DETAILED DESCRIPTION OF THE INVENTION

[0173] Disclosed herein are multifunctional molecules (also referred to herein as “multispecific molecules”) that include a plurality of (e.g., two or more) functionalities (or binding specificities), comprising (i) an antigen binding domain that binds to a calreticulin protein (e.g., a wild-type calreticulin protein and/or a calreticulin mutant protein), e.g., wherein the calreticulin protein comprises the amino acid sequence of SEQ ID NO: 6285, 1001, or 6286, and (ii) one, two, or all of: (a) an immune cell engager chosen from a T cell engager, an NK cell engager, a B cell engager, a dendritic cell engager, or a macrophage cell engager; (b) a cytokine molecule; (c) a stromal modifying moiety, and (d) a tumor-targeting moiety (e.g., which binds to a tumor antigen chosen from: G6B, CD34, CD41, P-selectin, Clec2, cKIT, FLT3, MPL, ITGB3, ITGB2, GP5, GP6, GP9, GP1BA, DSC2, FCGR2A, TNFRSF10A, TNFRSF10B, or TM4SF1). In some embodiments, the antigen binding domain binds to a calreticulin protein (e.g., a wild-type calreticulin protein or a mutant calreticulin protein, e.g., as described herein). In some embodiments, the antigen binding domain binds to a calreticulin mutant protein disclosed in Table 2 or Table 3. In some embodiments, the antigen binding domain binds to Type 1 calreticulin mutant protein disclosed in Table 2 or Table 3. In some embodiments, the antigen binding domain binds to Type 2 calreticulin mutant protein disclosed in Table 2 or Table 3. In some embodiments, the antigen binding domain binds to both Type 1 and Type 2 calreticulin mutant proteins disclosed in Table 2 or Table 3. In some embodiments, the T cell engager comprises an additional antigen binding domain that binds to the variable chain of the beta subunit of TCR (TCR PV), e.g., a TCR p V6 or TCR p V12.

[0174] In an embodiment, the multispecific or multifunctional molecule is a bispecific (or bifunctional) molecule, a trispecific (or trifunctional) molecule, or a tetraspecific (or tetrafunctional) molecule. In an embodiment, the multispecific or multifunctional molecule is a bispecific molecule.

[0175] Without being bound by theory, the multispecific or multifunctional molecules disclosed herein are expected to localize (e.g., bridge) and/or activate an immune cell (e.g., an immune effector cell chosen from a T cell, an NK cell, a B cell, a dendritic cell or a macrophage), in the presence of a cell expressing the calreticulin protein, e.g., on the surface. Increasing the proximity and/or activity of the immune cell, in the presence of the cell expressing the calreticulin protein, using the multispecific or multifunctional molecules described herein is expected to enhance an immune response against the target cell, thereby providing a more effective therapy.

[0176] Novel multifunctional, e.g., multispecific, molecules that include (i) a stromal modifying moiety and (ii) an antigen binding domain that binds to a calreticulin protein (e.g., a wild-type calreticulin protein and/or a calreticulin mutant protein), e.g., wherein the calreticulin protein comprises the amino acid sequence of SEQ ID NO: 6285, 1001, or 6286 are disclosed. Without being bound by theory, the multifunctional molecules disclosed herein are believed to inter alia target (e.g., localize to) a cancer site, and alter the tumor stroma, e.g., alter the tumor microenvironment near the cancer site. The multifunctional molecules can further include one or both of: an immune cell engager (e.g., chosen from one, two, three, or all of a T cell engager, NK cell engager, a B cell engager, a dendritic cell engager, or a macrophage cell engager); and/or a cytokine molecule. Accordingly, provided herein are, inter alia, multifunctional, e.g., multispecific molecules, that include the aforesaid moieties, nucleic acids encoding the same, methods of producing the aforesaid molecules, and methods of treating a cancer using the aforesaid molecules.

[0177] Accordingly, provided herein are, inter alia, multispecific or multifunctional molecules (e.g., multispecific or multifunctional antibody molecules) that include the aforesaid moieties, nucleic acids encoding the same, methods of producing the aforesaid molecules, and methods of treating a disease or disorder, e.g., cancer, using the aforesaid molecules.

### Definitions

[0178] In some embodiments, the multifunctional molecule includes an immune cell engager. “An immune cell engager” refers to one or more binding specificities that bind and/or activate an immune cell, e.g., a cell involved in an immune response. In some embodiments, the immune cell is chosen from a T cell, an NK cell, a B cell, a dendritic cell, and/or the macrophage cell. The immune cell engager can be an antibody molecule, a receptor molecule (e.g., a full length receptor, receptor fragment, or fusion thereof (e.g., a receptor-Fc fusion)), or a ligand molecule (e.g., a full length ligand, ligand fragment, or fusion thereof (e.g., a ligand-Fc fusion)) that binds to the immune cell antigen (e.g., the T cell, the NK cell antigen, the B cell antigen, the dendritic cell antigen, and/or the macrophage cell antigen). In some embodiments, the immune cell engager specifically binds to the target immune cell, e.g., binds preferentially to the target immune cell. For example, when the immune cell engager is an antibody molecule, it binds to an immune cell antigen (e.g., a T cell antigen, an NK cell antigen, a B cell antigen, a dendritic cell antigen, and/or a macrophage cell antigen) with a dissociation constant of less than about 10 nM.

[0179] As used herein, the terms “T cell receptor beta variable chain,” “TCRVβ,” “TCRVb,” and “TCRβV” are used interchangeably to refer to an extracellular region of the T cell receptor beta chain which comprises the antigen recognition domain of the T cell receptor. The term TCRVβ or TCRβV includes isoforms, mammalian, e.g., human TCRBV, species homologs of human and analogs comprising at least one common epitope with TCRBV. Human TCRβV comprises a gene family comprising subfamilies including, but not limited to: a TCRβ V6 subfamily, a TCRβ V10 subfamily, a TCRβ V12 subfamily, a TCRβ V5 subfamily, a TCRβ V7 subfamily, a TCRβ V11 subfamily, a TCRβ V14 subfamily, a TCRβ V16 subfamily, a TCRβ V18 subfamily, a TCRβ V9 subfamily, a TCRβ V13 subfamily, a TCRβ V4 subfamily, a TCRβ V3 subfamily, a TCRβ V2 subfamily, a TCRβ V15 subfamily, a TCRβ V30 subfamily, a TCRβ V19 subfamily, a TCRβ V27 subfamily, a TCRβ V28 subfamily, a TCRβ V24 subfamily, a TCRβ V20 subfamily, TCRβ V25 subfamily, or a TCRβ V29 subfamily. In some embodiments, the TCRβ V6 subfamily comprises: TCRβ V6-4*01, TCRβ V6-4*02, TCRβ V6-9*01, TCRβ V6-8*01, TCRβ V6-5*01, TCRβ V6-6*02, TCRβ V6-6*01, TCRβ V6-2*01, TCRβ V6-3*01 or TCRβ V6-1*01. In some embodiments, TCRβV comprises TCRβ V6-5*01. TCRβ V6-5*01 is also known as TRBV65; TCRBV6S5; TCRBV13S1, or TCRβ V13.1. The amino acid sequence of TCRβ V6-5*01, e.g., human TCRβ V6-5*01, is known in that art, e.g., as provided by IMGT ID L36092. In some embodiments, TCRβ V6-5*01 is encoded by the nucleic acid sequence of SEQ ID NO: 1043, or a sequence having 85%, 90%, 95%, 99% or more identity thereof. In some embodiments, TCRβ V6-5*01 comprises the amino acid sequence of SEQ ID NO: 1044, or a sequence having 85%, 90%, 95%, 99% or more identity thereof.

[0180] In some embodiments, the multifunctional molecule includes a cytokine molecule. As used herein, a “cytokine molecule” refers to full length, a fragment or a variant of a cytokine; a cytokine further comprising a receptor domain, e.g., a cytokine receptor dimerizing domain; or an agonist of a cytokine receptor, e.g., an antibody molecule (e.g., an agonistic antibody) to a cytokine receptor, that elicits at least one activity of a naturally-occurring cytokine. In some embodiments the cytokine molecule is chosen from interleukin-2 (IL-2), interleukin-7 (IL-7), interleukin-12 (IL-12), interleukin-15 (IL-15), interleukin-18 (IL-18), interleukin-21 (IL-21), or interferon gamma, or a fragment or variant thereof, or a combination of any of the aforesaid cytokines. The cytokine molecule can be a monomer or a dimer. In some embodiments, the cytokine molecule can further include a cytokine receptor dimerizing domain. In other embodiments, the cytokine molecule is an agonist of a cytokine receptor, e.g., an antibody molecule (e.g., an agonistic antibody) to a cytokine receptor chosen from an IL-15Ra or IL-21R.

[0181] As used herein, the term “molecule” as used in, e.g., antibody molecule, cytokine molecule, receptor molecule, includes full-length, naturally-occurring molecules, as well as variants, e.g., functional variants (e.g., truncations, fragments, mutated (e.g., substantially similar sequences) or derivatized form thereof), so long as at least one function and/or activity of the unmodified (e.g., naturally-occurring) molecule remains.

[0182] In some embodiments, the multifunctional molecule includes a stromal modifying moiety. A “stromal modifying moiety,” as used herein refers to an agent, e.g., a protein (e.g., an enzyme), that is capable of altering, e.g., degrading a component of, the stroma. In some embodiments, the component of the stroma is chosen from, e.g., an ECM component, e.g., a glycosaminoglycan, e.g., hyaluronan (also known as hyaluronic acid or HA), chondroitin sulfate, chondroitin, dermatan sulfate, heparin sulfate, heparin, entactin, tenascin, aggrecan and keratin sulfate; or an extracellular protein, e.g., collagen, laminin, elastin, fibrinogen, fibronectin, and vitronectin.

[0183] Certain terms are defined below.

[0184] As used herein, the articles “a” and “an” refer to one or more than one, e.g., to at least one, of the grammatical object of the article. The use of the words “a” or “an” when used in conjunction with the term “comprising” herein may mean “one,” but it is also consistent with the meaning of “one or more,” “at least one,” and “one or more than one.”

[0185] As used herein, “about” and “approximately” generally mean an acceptable degree of error for the quantity measured given the nature or precision of the measurements. Exemplary degrees of error are within 20 percent (%), typically, within 10%, and more typically, within 5% of a given range of values.

[0186] “Antibody molecule” as used herein refers to a protein, e.g., an immunoglobulin chain or fragment thereof, comprising at least one immunoglobulin variable domain sequence. An antibody molecule encompasses antibodies (e.g., full-length antibodies) and antibody fragments. In an embodiment, an antibody molecule comprises an antigen binding or functional fragment of a full-length antibody, or a full-length immunoglobulin chain. For example, a full-length antibody is an immunoglobulin (Ig) molecule (e.g., an IgG antibody) that is naturally occurring or formed by normal immunoglobulin gene fragment recombinatorial processes). In some embodiments, an antibody molecule refers to an immunologically active, antigen-binding portion of an immunoglobulin molecule, such as an antibody fragment. An antibody fragment, e.g., functional fragment, is a portion of an antibody, e.g., Fab, Fab′, F(ab′)₂, F(ab)₂, variable fragment (Fv), domain antibody (dAb), or single chain variable fragment (scFv). A functional antibody fragment binds to the same antigen as that recognized by the intact (e.g., full-length) antibody. The terms “antibody fragment” or “functional fragment” also include isolated fragments consisting of the variable regions, such as the “Fv” fragments consisting of the variable regions of the heavy and light chains or recombinant single chain polypeptide molecules in which light and heavy variable regions are connected by a peptide linker (“scFv proteins”). In some embodiments, an antibody fragment does not include portions of antibodies without antigen binding activity, such as Fc fragments or single amino acid residues. Exemplary antibody molecules include full length antibodies and antibody fragments, e.g., dAb (domain antibody), single chain, Fab, Fab′, and F(ab′)₂ fragments, and single chain variable fragments (scFvs).

[0187] As used herein, an “immunoglobulin variable domain sequence” refers to an amino acid sequence which can form the structure of an immunoglobulin variable domain. For example, the sequence may include all or part of the amino acid sequence of a naturally-occurring variable domain. For example, the sequence may or may not include one, two, or more N- or C-terminal amino acids, or may include other alterations that are compatible with formation of the protein structure.

[0188] In some embodiments, an antibody molecule is monospecific, e.g., it comprises binding specificity for a single epitope. In some embodiments, an antibody molecule is multispecific, e.g., it comprises a plurality of immunoglobulin variable domain sequences, where a first immunoglobulin variable domain sequence has binding specificity for a first epitope and a second immunoglobulin variable domain sequence has binding specificity for a second epitope. In some embodiments, an antibody molecule is a bispecific antibody molecule. “Bispecific antibody molecule” as used herein refers to an antibody molecule that has specificity for more than one (e.g., two, three, four, or more) epitope and/or antigen.

[0189] “Antigen” (Ag) as used herein refers to a molecule that can provoke an immune response, e.g., involving activation of certain immune cells and/or antibody generation. Any macromolecule, including almost all proteins or peptides, can be an antigen. Antigens can also be derived from genomic recombinant or DNA. For example, any DNA comprising a nucleotide sequence or a partial nucleotide sequence that encodes a protein capable of eliciting an immune response encodes an “antigen.” In some embodiments, an antigen does not need to be encoded solely by a full-length nucleotide sequence of a gene, nor does an antigen need to be encoded by a gene at all. In some embodiments, an antigen can be synthesized or can be derived from a biological sample, e.g., a tissue sample, a tumor sample, a cell, or a fluid with other biological components. As used, herein a “tumor antigen” or interchangeably, a “cancer antigen” includes any molecule present on, or associated with, a cancer, e.g., a cancer cell or a tumor microenvironment that can provoke an immune response. As used, herein an “immune cell antigen” includes any molecule present on, or associated with, an immune cell that can provoke an immune response.

[0190] The “antigen-binding site,” or “binding portion” of an antibody molecule refers to the part of an antibody molecule, e.g., an immunoglobulin (Ig) molecule, that participates in antigen binding. In some embodiments, the antigen binding site is formed by amino acid residues of the variable (V) regions of the heavy (H) and light (L) chains. Three highly divergent stretches within the variable regions of the heavy and light chains, referred to as hypervariable regions, are disposed between more conserved flanking stretches called “framework regions,” (FRs). FRs are amino acid sequences that are naturally found between, and adjacent to, hypervariable regions in immunoglobulins. In some embodiments, in an antibody molecule, the three hypervariable regions of a light chain and the three hypervariable regions of a heavy chain are disposed relative to each other in three dimensional space to form an antigen-binding surface, which is complementary to the three-dimensional surface of a bound antigen. The three hypervariable regions of each of the heavy and light chains are referred to as “complementarity-determining regions,” or “CDRs.” The framework region and CDRs have been defined and described, e.g., in Kabat, E. A., et al. (1991) Sequences of Proteins of Immunological Interest, Fifth Edition, U.S. Department of Health and Human Services, NIH Publication No. 91-3242, and Chothia, C. et al. (1987) J. Mol. Biol. 196:901-917. Each variable chain (e.g., variable heavy chain and variable light chain) is typically made up of three CDRs and four FRs, arranged from amino-terminus to carboxy-terminus in the amino acid order: FR1, CDR1, FR2, CDR2, FR3, CDR3, and FR4.

[0191] “Cancer” as used herein can encompass all types of oncogenic processes and/or cancerous growths. In some embodiments, cancer includes primary tumors as well as metastatic tissues or malignantly transformed cells, tissues, or organs. In some embodiments, cancer encompasses all histopathologies and stages, e.g., stages of invasiveness/severity, of a cancer. In some embodiments, cancer includes relapsed and/or resistant cancer. The terms “cancer” and “tumor” can be used interchangeably. For example, both terms encompass solid and liquid tumors. As used herein, the term “cancer” or “tumor” includes premalignant, as well as malignant cancers and tumors.

[0192] As used herein, an “immune cell” refers to any of various cells that function in the immune system, e.g., to protect against agents of infection and foreign matter. In some embodiments, this term includes leukocytes, e.g., neutrophils, eosinophils, basophils, lymphocytes, and monocytes. Innate leukocytes include phagocytes (e.g., macrophages, neutrophils, and dendritic cells), mast cells, eosinophils, basophils, and natural killer cells. Innate leukocytes identify and eliminate pathogens, either by attacking larger pathogens through contact or by engulfing and then killing microorganisms, and are mediators in the activation of an adaptive immune response. The cells of the adaptive immune system are special types of leukocytes, called lymphocytes. B cells and T cells are important types of lymphocytes and are derived from hematopoietic stem cells in the bone marrow. B cells are involved in the humoral immune response, whereas T cells are involved in cell-mediated immune response. The term “immune cell” includes immune effector cells.

[0193] “Immune effector cell,” as that term is used herein, refers to a cell that is involved in an immune response, e.g., in the promotion of an immune effector response. Examples of immune effector cells include, but are not limited to, T cells, e.g., alpha/beta T cells and gamma/delta T cells, B cells, natural killer (NK) cells, natural killer T (NK T) cells, and mast cells.

[0194] The term “effector function” or “effector response” refers to a specialized function of a cell. Effector function of a T cell, for example, may be cytolytic activity or helper activity including the secretion of cytokines.

[0195] The compositions and methods of the present invention encompass polypeptides and nucleic acids having the sequences specified, or sequences substantially identical or similar thereto, e.g., sequences at least 80%, 85%, 90%, 95% identical or higher to the sequence specified. In the context of an amino acid sequence, the term “substantially identical” is used herein to refer to a first amino acid that contains a sufficient or minimum number of amino acid residues that are i) identical to, or ii) conservative substitutions of aligned amino acid residues in a second amino acid sequence such that the first and second amino acid sequences can have a common structural domain and/or common functional activity. For example, amino acid sequences that contain a common structural domain having at least about 80%, 85%, 90%. 91%, 92%, 93%, 94%, 95%, 96%, 97%, 98% or 99% identity to a reference sequence, e.g., a sequence provided herein.

[0196] In the context of nucleotide sequence, the term “substantially identical” is used herein to refer to a first nucleic acid sequence that contains a sufficient or minimum number of nucleotides that are identical to aligned nucleotides in a second nucleic acid sequence such that the first and second nucleotide sequences encode a polypeptide having common functional activity, or encode a common structural polypeptide domain or a common functional polypeptide activity. For example, nucleotide sequences having at least about 80%, 85%, 90%, 91%, 92%, 93%, 94%, 95%, 96%, 97%, 98% or 99% identity to a reference sequence, e.g., a sequence provided herein.

[0197] The term “variant” refers to a polypeptide that has a substantially identical amino acid sequence to a reference amino acid sequence, or is encoded by a substantially identical nucleotide sequence. In some embodiments, the variant is a functional variant.

[0198] The term “functional variant” refers to a polypeptide that has a substantially identical amino acid sequence to a reference amino acid sequence, or is encoded by a substantially identical nucleotide sequence, and is capable of having one or more activities of the reference amino acid sequence.

[0199] Calculations of homology or sequence identity between sequences (the terms are used interchangeably herein) are performed as follows.

[0200] To determine the percent identity of two amino acid sequences, or of two nucleic acid sequences, the sequences are aligned for optimal comparison purposes (e.g., gaps can be introduced in one or both of a first and a second amino acid or nucleic acid sequence for optimal alignment and non-homologous sequences can be disregarded for comparison purposes). In a preferred embodiment, the length of a reference sequence aligned for comparison purposes is at least 30%, preferably at least 40%, more preferably at least 50%, 60%, and even more preferably at least 70%, 80%, 90%, 100% of the length of the reference sequence. The amino acid residues or nucleotides at corresponding amino acid positions or nucleotide positions are then compared. When a position in the first sequence is occupied by the same amino acid residue or nucleotide as the corresponding position in the second sequence, then the molecules are identical at that position (as used herein amino acid or nucleic acid “identity” is equivalent to amino acid or nucleic acid “homology”).

[0201] The percent identity between the two sequences is a function of the number of identical positions shared by the sequences, taking into account the number of gaps, and the length of each gap, which need to be introduced for optimal alignment of the two sequences.

[0202] The comparison of sequences and determination of percent identity between two sequences can be accomplished using a mathematical algorithm. In a preferred embodiment, the percent identity between two amino acid sequences is determined using the Needleman and Wunsch ((1970) J. Mol. Biol. 48:444-453) algorithm which has been incorporated into the GAP program in the GCG software package (available at http://www.gcg.com), using either a Blossum 62 matrix or a PAM250 matrix, and a gap weight of 16, 14, 12, 10, 8, 6, or 4 and a length weight of 1, 2, 3, 4, 5, or 6. In yet another preferred embodiment, the percent identity between two nucleotide sequences is determined using the GAP program in the GCG software package (available at http://www.gcg.com), using a NWSgapdna.CMP matrix and a gap weight of 40, 50, 60, 70, or 80 and a length weight of 1, 2, 3, 4, 5, or 6. A particularly preferred set of parameters (and the one that should be used unless otherwise specified) are a Blossum 62 scoring matrix with a gap penalty of 12, a gap extend penalty of 4, and a frameshift gap penalty of 5.

[0203] The percent identity between two amino acid or nucleotide sequences can be determined using the algorithm of E. Meyers and W. Miller ((1989) CABIOS, 4:11-17) which has been incorporated into the ALIGN program (version 2.0), using a PAM120 weight residue table, a gap length penalty of 12 and a gap penalty of 4.

[0204] The nucleic acid and protein sequences described herein can be used as a “query sequence” to perform a search against public databases to, for example, identify other family members or related sequences. Such searches can be performed using the NBLAST and XBLAST programs (version 2.0) of Altschul, et al. (1990) J. Mol. Biol. 215:403-10. BLAST nucleotide searches can be performed with the NBLAST program, score=100, wordlength=12 to obtain nucleotide sequences homologous to a nucleic acid molecule of the invention. BLAST protein searches can be performed with the XBLAST program, score=50, wordlength=3 to obtain amino acid sequences homologous to protein molecules of the invention. To obtain gapped alignments for comparison purposes, Gapped BLAST can be utilized as described in Altschul et al., (1997) Nucleic Acids Res. 25:3389-3402. When utilizing BLAST and Gapped BLAST programs, the default parameters of the respective programs (e.g., XBLAST and NBLAST) can be used. See http://www.ncbi.nlm.nih.gov.

[0205] It is understood that the molecules of the present invention may have additional conservative or non-essential amino acid substitutions, which do not have a substantial effect on their functions.

[0206] The term “amino acid” is intended to embrace all molecules, whether natural or synthetic, which include both an amino functionality and an acid functionality and capable of being included in a polymer of naturally-occurring amino acids. Exemplary amino acids include naturally-occurring amino acids; analogs, derivatives and congeners thereof, amino acid analogs having variant side chains; and all stereoisomers of any of any of the foregoing. As used herein the term “amino acid” includes both the D- or L-optical isomers and peptidomimetics.

[0207] A “conservative amino acid substitution” is one in which the amino acid residue is replaced with an amino acid residue having a similar side chain. Families of amino acid residues having similar side chains have been defined in the art. These families include amino acids with basic side chains (e.g., lysine, arginine, histidine), acidic side chains (e.g., aspartic acid, glutamic acid), uncharged polar side chains (e.g., glycine, asparagine, glutamine, serine, threonine, tyrosine, cysteine), nonpolar side chains (e.g., alanine, valine, leucine, isoleucine, proline, phenylalanine, methionine, tryptophan), beta-branched side chains (e.g., threonine, valine, isoleucine) and aromatic side chains (e.g., tyrosine, phenylalanine, tryptophan, histidine).

[0208] The terms “polypeptide”, “peptide” and “protein” (if single chain) are used interchangeably herein to refer to polymers of amino acids of any length. The polymer may be linear or branched, it may comprise modified amino acids, and it may be interrupted by non-amino acids. The terms also encompass an amino acid polymer that has been modified; for example, disulfide bond formation, glycosylation, lipidation, acetylation, phosphorylation, or any other manipulation, such as conjugation with a labeling component. The polypeptide can be isolated from natural sources, can be a produced by recombinant techniques from a eukaryotic or prokaryotic host, or can be a product of synthetic procedures.

[0209] The terms “nucleic acid,” “nucleic acid sequence,” “nucleotide sequence,” or “polynucleotide sequence,” and “polynucleotide” are used interchangeably. They refer to a polymeric form of nucleotides of any length, either deoxyribonucleotides or ribonucleotides, or analogs thereof. The polynucleotide may be either single-stranded or double-stranded, and if single-stranded may be the coding strand or non-coding (antisense) strand. A polynucleotide may comprise modified nucleotides, such as methylated nucleotides and nucleotide analogs. The sequence of nucleotides may be interrupted by non-nucleotide components. A polynucleotide may be further modified after polymerization, such as by conjugation with a labeling component. The nucleic acid may be a recombinant polynucleotide, or a polynucleotide of genomic, cDNA, semisynthetic, or synthetic origin which either does not occur in nature or is linked to another polynucleotide in a non-natural arrangement.

[0210] The term “isolated,” as used herein, refers to material that is removed from its original or native environment (e.g., the natural environment if it is naturally occurring). For example, a naturally-occurring polynucleotide or polypeptide present in a living animal is not isolated, but the same polynucleotide or polypeptide, separated by human intervention from some or all of the co-existing materials in the natural system, is isolated. Such polynucleotides could be part of a vector and/or such polynucleotides or polypeptides could be part of a composition, and still be isolated in that such vector or composition is not part of the environment in which it is found in nature.

[0211] As used herein, the term “transforming growth factor beta-1 (TGF-beta 1)” refers to a protein that in humans is encoded by the gene TGFB1, or its orthologs. Swiss-Prot accession number P01137 provides exemplary human TGF-beta 1 amino acid sequences. An exemplary immature human TGF-beta 1 amino acid sequence is provided in SEQ ID NO: 6378. An exemplary mature human TGF-beta 1 amino acid sequence is provided in SEQ ID NO: 6395.

[0212] As used herein, the term “transforming growth factor beta-2 (TGF-beta 2)” refers to a protein that in humans is encoded by the gene TGFB2, or its orthologs. Swiss-Prot accession number P61812 provides exemplary human TGF-beta 2 amino acid sequences. An exemplary immature human TGF-beta 2 amino acid sequence is provided in SEQ ID NO: 6379. An exemplary mature human TGF-beta 2 amino acid sequence is provided in SEQ ID NO: 6396.

[0213] As used herein, the term “transforming growth factor beta-3 (TGF-beta 3)” refers to a protein that in humans is encoded by the gene TGFB3, or its orthologs. Swiss-Prot accession number P10600 provides exemplary human TGF-beta 3 amino acid sequences. An exemplary immature human TGF-beta 3 amino acid sequence is provided in SEQ ID NO: 6380. An exemplary mature human TGF-beta 3 amino acid sequence is provided in SEQ ID NO: 6397.

[0214] As used herein, a “TGF-beta receptor polypeptide” refers to a TGF-beta receptor (e.g., TGFBR1, TGFBR2, or TGFBR3) or its fragment, or variant thereof.

[0215] As used herein, the term “transforming growth factor beta receptor type 1 (TGFBR1)” (also known as ALK-5 or SKR4) refers to a protein that in humans is encoded by the gene TGFBR1, or its orthologs. Swiss-Prot accession number P36897 provides exemplary human TGFBR1 amino acid sequences. Exemplary immature human TGFBR1 amino acid sequences are provided in SEQ ID NOs: 6381, 6382, and 6383. Exemplary mature human TGFBR1 amino acid sequences are provided in SEQ ID NOs: 6398, 6399, and 6400. As used herein, a “TGFBR1 polypeptide” refers to a TGFBR1 or its fragment, or variant thereof.

[0216] As used herein, the term “transforming growth factor beta receptor type 2 (TGFBR2)” refers to a protein that in humans is encoded by the gene TGFBR2, or its orthologs. Swiss-Prot accession number P37173 provides exemplary human TGFBR2 amino acid sequences. Exemplary immature human TGFBR2 amino acid sequences are provided in SEQ ID NOs: 6384 and 6385. Exemplary mature human TGFBR2 amino acid sequences are provided in SEQ ID NOs: 6401 and 6402. As used herein, a “TGFBR2 polypeptide” refers to a TGFBR2 or its fragment, or variant thereof.

[0217] As used herein, the term “transforming growth factor beta receptor type 3 (TGFBR3)” refers to a protein that in humans is encoded by the gene TGFBR3, or its orthologs. Swiss-Prot accession number Q03167 provides exemplary human TGFBR3 amino acid sequences. Exemplary immature human TGFBR3 amino acid sequences are provided in SEQ ID NOs: 6392 and 6393. Exemplary mature human TGFBR3 amino acid sequences are provided in SEQ ID NOs: 6403 and 6404. As used herein, a “TGFBR3 polypeptide” refers to a TGFBR3 or its fragment, or variant thereof.

[0218] Various aspects of the invention are described in further detail below. Additional definitions are set out throughout the specification.

### Antibody Molecules

[0219] In some embodiments, a multifunctional molecule, multispecific molecule, and/or an antigen binding domain as described herein comprises an antibody molecule. In one embodiment, the antibody molecule binds to a cancer antigen, e.g., a tumor antigen or a stromal antigen. In some embodiments, the cancer antigen is, e.g., a mammalian, e.g., a human, cancer antigen. In other embodiments, the antibody molecule binds to an immune cell antigen, e.g., a mammalian, e.g., a human, immune cell antigen. For example, the antibody molecule binds specifically to an epitope, e.g., linear or conformational epitope, on the cancer antigen or the immune cell antigen.

[0220] In an embodiment, an antibody molecule is a monospecific antibody molecule and binds a single epitope. E.g., a monospecific antibody molecule having a plurality of immunoglobulin variable domain sequences, each of which binds the same epitope.

[0221] In an embodiment an antibody molecule is a multispecific or multifunctional antibody molecule, e.g., it comprises a plurality of immunoglobulin variable domains sequences, wherein a first immunoglobulin variable domain sequence of the plurality has binding specificity for a first epitope and a second immunoglobulin variable domain sequence of the plurality has binding specificity for a second epitope. In an embodiment the first and second epitopes are on the same antigen, e.g., the same protein (or subunit of a multimeric protein). In an embodiment the first and second epitopes overlap. In an embodiment the first and second epitopes do not overlap. In an embodiment the first and second epitopes are on different antigens, e.g., the different proteins (or different subunits of a multimeric protein). In an embodiment a multispecific antibody molecule comprises a third, fourth or fifth immunoglobulin variable domain. In an embodiment, a multispecific antibody molecule is a bispecific antibody molecule, a trispecific antibody molecule, or a tetraspecific antibody molecule.

[0222] In an embodiment a multispecific antibody molecule is a bispecific antibody molecule. A bispecific antibody has specificity for no more than two antigens. A bispecific antibody molecule is characterized by a first immunoglobulin variable domain sequence which has binding specificity for a first epitope and a second immunoglobulin variable domain sequence that has binding specificity for a second epitope. In an embodiment the first and second epitopes are on the same antigen, e.g., the same protein (or subunit of a multimeric protein). In an embodiment the first and second epitopes overlap. In an embodiment the first and second epitopes do not overlap. In an embodiment the first and second epitopes are on different antigens, e.g., the different proteins (or different subunits of a multimeric protein). In an embodiment a bispecific antibody molecule comprises a heavy chain variable domain sequence and a light chain variable domain sequence which have binding specificity for a first epitope and a heavy chain variable domain sequence and a light chain variable domain sequence which have binding specificity for a second epitope. In an embodiment a bispecific antibody molecule comprises a half antibody having binding specificity for a first epitope and a half antibody having binding specificity for a second epitope. In an embodiment a bispecific antibody molecule comprises a half antibody, or fragment thereof, having binding specificity for a first epitope and a half antibody, or fragment thereof, having binding specificity for a second epitope. In an embodiment a bispecific antibody molecule comprises a scFv or a Fab, or fragment thereof, have binding specificity for a first epitope and a scFv or a Fab, or fragment thereof, have binding specificity for a second epitope.

[0223] In an embodiment, an antibody molecule comprises a diabody, and a single-chain molecule, as well as an antigen-binding fragment of an antibody (e.g., Fab, F(ab′)₂, and Fv). For example, an antibody molecule can include a heavy (H) chain variable domain sequence (abbreviated herein as VH), and a light (L) chain variable domain sequence (abbreviated herein as VL). In an embodiment an antibody molecule comprises or consists of a heavy chain and a light chain (referred to herein as a half antibody. In another example, an antibody molecule includes two heavy (H) chain variable domain sequences and two light (L) chain variable domain sequence, thereby forming two antigen binding sites, such as Fab, Fab′, F(ab′)₂, Fc, Fd, Fd′, Fv, single chain antibodies (scFv for example), single variable domain antibodies, diabodies (Dab) (bivalent and bispecific), and chimeric (e.g., humanized) antibodies, which may be produced by the modification of whole antibodies or those synthesized de novo using recombinant DNA technologies. These functional antibody fragments retain the ability to selectively bind with their respective antigen or receptor. Antibodies and antibody fragments can be from any class of antibodies including, but not limited to, IgG, IgA, IgM, IgD, and IgE, and from any subclass (e.g., IgG1, IgG2, IgG3, and IgG4) of antibodies. The a preparation of antibody molecules can be monoclonal or polyclonal. An antibody molecule can also be a human, humanized, CDR-grafted, or in vitro generated antibody. The antibody can have a heavy chain constant region chosen from, e.g., IgG1, IgG2, IgG3, or IgG4. The antibody can also have a light chain chosen from, e.g., kappa or lambda. The term “immunoglobulin” (Ig) is used interchangeably with the term “antibody” herein.

[0224] Examples of antigen-binding fragments of an antibody molecule include: (i) a Fab fragment, a monovalent fragment consisting of the VL, VH, CL and CH1 domains; (ii) a F(ab′)₂ fragment, a bivalent fragment comprising two Fab fragments linked by a disulfide bridge at the hinge region; (iii) a Fd fragment consisting of the VH and CH1 domains; (iv) a Fv fragment consisting of the VL and VH domains of a single arm of an antibody, (v) a diabody (dAb) fragment, which consists of a VH domain; (vi) a camelid or camelized variable domain; (vii) a single chain Fv (scFv), see e.g., Bird et al. (1988) Science 242:423-426; and Huston et al. (1988) Proc. Natl. Acad. Sci. USA 85:5879-5883); (viii) a single domain antibody. These antibody fragments are obtained using conventional techniques known to those with skill in the art, and the fragments are screened for utility in the same manner as are intact antibodies.

[0225] Antibody molecules include intact molecules as well as functional fragments thereof. Constant regions of the antibody molecules can be altered, e.g., mutated, to modify the properties of the antibody (e.g., to increase or decrease one or more of: Fc receptor binding, antibody glycosylation, the number of cysteine residues, effector cell function, or complement function).

[0226] Antibody molecules can also be single domain antibodies. Single domain antibodies can include antibodies whose complementary determining regions are part of a single domain polypeptide. Examples include, but are not limited to, heavy chain antibodies, antibodies naturally devoid of light chains, single domain antibodies derived from conventional 4-chain antibodies, engineered antibodies and single domain scaffolds other than those derived from antibodies. Single domain antibodies may be any of the art, or any future single domain antibodies. Single domain antibodies may be derived from any species including, but not limited to mouse, human, camel, llama, fish, shark, goat, rabbit, and bovine. According to another aspect of the invention, a single domain antibody is a naturally occurring single domain antibody known as heavy chain antibody devoid of light chains. Such single domain antibodies are disclosed in WO 9404678, for example. For clarity reasons, this variable domain derived from a heavy chain antibody naturally devoid of light chain is known herein as a VHH or nanobody to distinguish it from the conventional VH of four chain immunoglobulins. Such a VHH molecule can be derived from antibodies raised in Camelidae species, for example in camel, llama, dromedary, alpaca and guanaco. Other species besides Camelidae may produce heavy chain antibodies naturally devoid of light chain; such VHHs are within the scope of the invention.

[0227] The VH and VL regions can be subdivided into regions of hypervariability, termed “complementarity determining regions” (CDR), interspersed with regions that are more conserved, termed “framework regions” (FR or FW).

[0228] The extent of the framework region and CDRs has been precisely defined by a number of methods (see, Kabat, E. A., et al. (1991) Sequences of Proteins of Immunological Interest, Fifth Edition, U.S. Department of Health and Human Services, NIH Publication No. 91-3242; Chothia, C. et al. (1987) J. Mol. Biol. 196:901-917; and the AbM definition used by Oxford Molecular's AbM antibody modeling software. See, generally, e.g., Protein Sequence and Structure Analysis of Antibody Variable Domains. In: Antibody Engineering Lab Manual (Ed.: Duebel, S. and Kontermann, R., Springer-Verlag, Heidelberg).

[0229] The terms “complementarity determining region,” and “CDR,” as used herein refer to the sequences of amino acids within antibody variable regions which confer antigen specificity and binding affinity. In general, there are three CDRs in each heavy chain variable region (HCDR1, HCDR2, HCDR3) and three CDRs in each light chain variable region (LCDR1, LCDR2, LCDR3).

[0230] The precise amino acid sequence boundaries of a given CDR can be determined using any of a number of known schemes, including those described by Kabat et al. (1991), “Sequences of Proteins of Immunological Interest,” 5th Ed. Public Health Service, National Institutes of Health, Bethesda, MD (“Kabat” numbering scheme), Al-Lazikani et al., (1997) JMB 273,927-948 (“Chothia” numbering scheme). As used herein, the CDRs defined according the “Chothia” number scheme are also sometimes referred to as “hypervariable loops.”

[0231] For example, under Kabat, the CDR amino acid residues in the heavy chain variable domain (VH) are numbered 31-35 (HCDR1), 50-65 (HCDR2), and 95-102 (HCDR3); and the CDR amino acid residues in the light chain variable domain (VL) are numbered 24-34 (LCDR1), 50-56 (LCDR2), and 89-97 (LCDR3). Under Chothia, the CDR amino acids in the VH are numbered 26-32 (HCDR1), 52-56 (HCDR2), and 95-102 (HCDR3); and the amino acid residues in VL are numbered 26-32 (LCDR1), 50-52 (LCDR2), and 91-96 (LCDR3).

[0232] Each VH and VL typically includes three CDRs and four FRs, arranged from amino-terminus to carboxy-terminus in the following order: FR1, CDR1, FR2, CDR2, FR3, CDR3, FR4.

[0233] The antibody molecule can be a polyclonal or a monoclonal antibody.

[0234] The terms “monoclonal antibody” or “monoclonal antibody composition” as used herein refer to a preparation of antibody molecules of single molecular composition. A monoclonal antibody composition displays a single binding specificity and affinity for a particular epitope. A monoclonal antibody can be made by hybridoma technology or by methods that do not use hybridoma technology (e.g., recombinant methods).

[0235] The antibody can be recombinantly produced, e.g., produced by phage display or by combinatorial methods.

[0236] Phage display and combinatorial methods for generating antibodies are known in the art (as described in, e.g., Ladner et al. U.S. Pat. No. 5,223,409; Kang et al. International Publication No. WO 92/18619; Dower et al. International Publication No. WO 91/17271; Winter et al. International Publication WO 92/20791; Markland et al. International Publication No. WO 92/15679; Breitling et al. International Publication WO 93/01288; McCafferty et al. International Publication No. WO 92/01047; Garrard et al. International Publication No. WO 92/09690; Ladner et al. International Publication No. WO 90/02809; Fuchs et al. (1991) Bio Technology 9:1370-1372; Hay et al. (1992) Hum Antibod Hybridomas 3:81-85; Huse et al. (1989) Science 246:1275-1281; Griffths et al. (1993) EMBO J 12:725-734; Hawkins et al. (1992) JMol Biol 226:889-896; Clackson et al. (1991) Nature 352:624-628; Gram et al. (1992) PNAS 89:3576-3580; Garrad et al. (1991) Bio Technology 9:1373-1377; Hoogenboom et al. (1991) Nuc Acid Res 19:4133-4137; and Barbas et al. (1991) PNAS 88:7978-7982, the contents of all of which are incorporated by reference herein).

[0237] In one embodiment, the antibody is a fully human antibody (e.g., an antibody made in a mouse which has been genetically engineered to produce an antibody from a human immunoglobulin sequence), or a non-human antibody, e.g., a rodent (mouse or rat), goat, primate (e.g., monkey), camel antibody. Preferably, the non-human antibody is a rodent (mouse or rat antibody). Methods of producing rodent antibodies are known in the art.

[0238] Human monoclonal antibodies can be generated using transgenic mice carrying the human immunoglobulin genes rather than the mouse system. Splenocytes from these transgenic mice immunized with the antigen of interest are used to produce hybridomas that secrete human mAbs with specific affinities for epitopes from a human protein (see, e.g., Wood et al. International Application WO 91/00906, Kucherlapati et al. PCT publication WO 91/10741; Lonberg et al. International Application WO 92/03918; Kay et al. International Application 92/03917; Lonberg, N. et al. 1994 Nature 368:856-859; Green, L. L. et al. 1994 Nature Genet. 7:13-21; Morrison, S. L. et al. 1994 Proc. Natl. Acad. Sci. USA 81:6851-6855; Bruggeman et al. 1993 Year Immunol 7:33-40; Tuaillon et al. 1993 PNAS 90:3720-3724; Bruggeman et al. 1991 Eur J Immunol 21:1323-1326).

[0239] An antibody molecule can be one in which the variable region, or a portion thereof, e.g., the CDRs, are generated in a non-human organism, e.g., a rat or mouse. Chimeric, CDR-grafted, and humanized antibodies are within the invention. Antibody molecules generated in a non-human organism, e.g., a rat or mouse, and then modified, e.g., in the variable framework or constant region, to decrease antigenicity in a human are within the invention.

[0240] An “effectively human” protein is a protein that does substantially not evoke a neutralizing antibody response, e.g., the human anti-murine antibody (HAMA) response. HAMA can be problematic in a number of circumstances, e.g., if the antibody molecule is administered repeatedly, e.g., in treatment of a chronic or recurrent disease condition. A HAMA response can make repeated antibody administration potentially ineffective because of an increased antibody clearance from the serum (see, e.g., Saleh et al., Cancer Immunol. Immunother., 32:180-190 (1990)) and also because of potential allergic reactions (see, e.g., LoBuglio et al., Hybridoma, 5:5117-5123 (1986)).

[0241] Chimeric antibodies can be produced by recombinant DNA techniques known in the art (see Robinson et al., International Patent Publication PCT/US86/02269; Akira, et al., European Patent Application 184,187; Taniguchi, M., European Patent Application 171,496; Morrison et al., European Patent Application 173,494; Neuberger et al., International Application WO 86/01533; Cabilly et al. U.S. Pat. No. 4,816,567; Cabilly et al., European Patent Application 125,023; Better et al. (1988 Science 240:1041-1043); Liu et al. (1987) PNAS 84:3439-3443; Liu et al., 1987, J. Immunol. 139:3521-3526; Sun et al. (1987) PNAS 84:214-218; Nishimura et al., 1987, Canc. Res. 47:999-1005; Wood et al. (1985) Nature 314:446-449; and Shaw et al., 1988, J Natl Cancer Inst. 80:1553-1559).

[0242] A humanized or CDR-grafted antibody will have at least one or two but generally all three recipient CDRs (of heavy and or light immuoglobulin chains) replaced with a donor CDR. The antibody may be replaced with at least a portion of a non-human CDR or only some of the CDRs may be replaced with non-human CDRs. It is only necessary to replace the number of CDRs required for binding to the antigen. Preferably, the donor will be a rodent antibody, e.g., a rat or mouse antibody, and the recipient will be a human framework or a human consensus framework. Typically, the immunoglobulin providing the CDRs is called the “donor” and the immunoglobulin providing the framework is called the “acceptor.” In one embodiment, the donor immunoglobulin is a non-human (e.g., rodent). The acceptor framework is a naturally-occurring (e.g., a human) framework or a consensus framework, or a sequence about 85% or higher, preferably 90%, 95%, 99% or higher identical thereto.

[0243] As used herein, the term “consensus sequence” refers to the sequence formed from the most frequently occurring amino acids (or nucleotides) in a family of related sequences (See e.g., Winnaker, From Genes to Clones (Verlagsgesellschaft, Weinheim, Germany 1987). In a family of proteins, each position in the consensus sequence is occupied by the amino acid occurring most frequently at that position in the family. If two amino acids occur equally frequently, either can be included in the consensus sequence. A “consensus framework” refers to the framework region in the consensus immunoglobulin sequence.

[0244] An antibody molecule can be humanized by methods known in the art (see e.g., Morrison, S. L., 1985, Science 229:1202-1207, by Oi et al., 1986, BioTechniques 4:214, and by Queen et al. U.S. Pat. Nos. 5,585,089, 5,693,761 and 5,693,762, the contents of all of which are hereby incorporated by reference).

[0245] Humanized or CDR-grafted antibody molecules can be produced by CDR-grafting or CDR substitution, wherein one, two, or all CDRs of an immunoglobulin chain can be replaced. See e.g., U.S. Pat. No. 5,225,539; Jones et al. 1986 Nature 321:552-525; Verhoeyan et al. 1988 Science 239:1534; Beidler et al. 1988 J. Immunol. 141:4053-4060; Winter U.S. Pat. No. 5,225,539, the contents of all of which are hereby expressly incorporated by reference. Winter describes a CDR-grafting method which may be used to prepare the humanized antibodies of the present invention (UK Patent Application GB 2188638A, filed on Mar. 26, 1987; Winter U.S. Pat. No. 5,225,539), the contents of which is expressly incorporated by reference.

[0246] Also within the scope of the invention are humanized antibody molecules in which specific amino acids have been substituted, deleted or added. Criteria for selecting amino acids from the donor are described in U.S. Pat. No. 5,585,089, e.g., columns 12-16 of U.S. Pat. No. 5,585,089, e.g., columns 12-16 of U.S. Pat. No. 5,585,089, the contents of which are hereby incorporated by reference. Other techniques for humanizing antibodies are described in Padlan et al. EP 519596 A1, published on Dec. 23, 1992.

[0247] The antibody molecule can be a single chain antibody. A single-chain antibody (scFv) may be engineered (see, for example, Colcher, D. et al. (1999) Ann N YAcad Sci 880:263-80; and Reiter, Y. (1996) Clin Cancer Res 2:245-52). The single chain antibody can be dimerized or multimerized to generate multivalent antibodies having specificities for different epitopes of the same target protein.

[0248] In yet other embodiments, the antibody molecule has a heavy chain constant region chosen from, e.g., the heavy chain constant regions of IgG1, IgG2, IgG3, IgG4, IgM, IgA1, IgA2, IgD, and IgE; particularly, chosen from, e.g., the (e.g., human) heavy chain constant regions of IgG1, IgG2, IgG3, and IgG4. In another embodiment, the antibody molecule has a light chain constant region chosen from, e.g., the (e.g., human) light chain constant regions of kappa or lambda. The constant region can be altered, e.g., mutated, to modify the properties of the antibody (e.g., to increase or decrease one or more of: Fc receptor binding, antibody glycosylation, the number of cysteine residues, effector cell function, and/or complement function). In one embodiment the antibody has: effector function; and can fix complement. In other embodiments the antibody does not; recruit effector cells; or fix complement. In another embodiment, the antibody has reduced or no ability to bind an Fc receptor. For example, it is a isotype or subtype, fragment or other mutant, which does not support binding to an Fc receptor, e.g., it has a mutagenized or deleted Fc receptor binding region.

[0249] Methods for altering an antibody constant region are known in the art. Antibodies with altered function, e.g. altered affinity for an effector ligand, such as FcR on a cell, or the C1 component of complement can be produced by replacing at least one amino acid residue in the constant portion of the antibody with a different residue (see e.g., EP 388,151 Al, U.S. Pat. Nos. 5,624,821 and 5,648,260, the contents of all of which are hereby incorporated by reference). Similar type of alterations could be described which if applied to the murine, or other species immunoglobulin would reduce or eliminate these functions.

[0250] An antibody molecule can be derivatized or linked to another functional molecule (e.g., another peptide or protein). As used herein, a “derivatized” antibody molecule is one that has been modified. Methods of derivatization include but are not limited to the addition of a fluorescent moiety, a radionucleotide, a toxin, an enzyme or an affinity ligand such as biotin. Accordingly, the antibody molecules of the invention are intended to include derivatized and otherwise modified forms of the antibodies described herein, including immunoadhesion molecules. For example, an antibody molecule can be functionally linked (by chemical coupling, genetic fusion, noncovalent association or otherwise) to one or more other molecular entities, such as another antibody (e.g., a bispecific antibody or a diabody), a detectable agent, a cytotoxic agent, a pharmaceutical agent, and/or a protein or peptide that can mediate association of the antibody or antibody portion with another molecule (such as a streptavidin core region or a polyhistidine tag).

[0251] One type of derivatized antibody molecule is produced by crosslinking two or more antibodies (of the same type or of different types, e.g., to create bispecific antibodies). Suitable crosslinkers include those that are heterobifunctional, having two distinctly reactive groups separated by an appropriate spacer (e.g., m-maleimidobenzoyl-N-hydroxysuccinimide ester) or homobifunctional (e.g., disuccinimidyl suberate). Such linkers are available from Pierce Chemical Company, Rockford, Ill.

### Multispecific or Multifunctional Antibody Molecules

[0252] Exemplary structures of multispecific and multifunctional molecules defined herein are described throughout. Exemplary structures are further described in: Weidle U et al. (2013) The Intriguing Options of Multispecific Antibody Formats for Treatment of Cancer. Cancer Genomics & Proteomics 10: 1-18 (2013); and Spiess C et al. (2015) Alternative molecular formats and therapeutic applications for bispecific antibodies. Molecular Immunology 67: 95-106; the full contents of each of which is incorporated by reference herein).

[0253] In some embodiments, multispecific antibody molecules can comprise more than one antigen-binding site, where different sites are specific for different antigens. In some embodiments, multispecific antibody molecules can bind more than one (e.g., two or more) epitopes on the same antigen. In some embodiments, multispecific antibody molecules comprise an antigen-binding site specific for a target cell (e.g., cancer cell) and a different antigen-binding site specific for an immune effector cell. In some embodiments, the multispecific antibody molecule is a bispecific, trispecific, or tetraspecific antibody molecule. In one embodiment, the multispecific antibody molecule is a bispecific antibody molecule. Bispecific antibody molecules can be classified into five different structural groups: (i) bispecific immunoglobulin G (BsIgG); (ii) IgG appended with an additional antigen-binding moiety; (iii) bispecific antibody fragments; (iv) bispecific fusion proteins; and (v) bispecific antibody conjugates.

[0254] BsIgG is a format that is monovalent for each antigen. Exemplary BsIgG formats include but are not limited to crossMab, DAF (two-in-one), DAF (four-in-one), DutaMab, DT-IgG, knobs-in-holes common LC, knobs-in-holes assembly, charge pair, Fab-arm exchange, SEEDbody, triomab, LUZ-Y, Fcab, κλ-body, orthogonal Fab. See Spiess et al. Mol. Immunol. 67(2015):95-106. Exemplary BsIgGs include catumaxomab (Fresenius Biotech, Trion Pharma, Neopharm), which contains an anti-CD3 arm and an anti-EpCAM arm; and ertumaxomab (Neovii Biotech, Fresenius Biotech), which targets CD3 and HER2. In some embodiments, BsIgG comprises heavy chains that are engineered for heterodimerization. For example, heavy chains can be engineered for heterodimerization using a “knobs-into-holes” strategy, a SEED platform, a common heavy chain (e.g., in κλ-bodies), and use of heterodimeric Fc regions. See Spiess et al. Mol. Immunol. 67(2015):95-106. Strategies that have been used to avoid heavy chain pairing of homodimers in BsIgG include knobs-in-holes, duobody, azymetric, charge pair, HA-TF, SEEDbody, and differential protein A affinity. See Id. BsIgG can be produced by separate expression of the component antibodies in different host cells and subsequent purification/assembly into a BsIgG. BsIgG can also be produced by expression of the component antibodies in a single host cell. BsIgG can be purified using affinity chromatography, e.g., using protein A and sequential pH elution.

[0255] IgG appended with an additional antigen-binding moiety is another format of bispecific antibody molecules. For example, monospecific IgG can be engineered to have bispecificity by appending an additional antigen-binding unit onto the monospecific IgG, e.g., at the N- or C-terminus of either the heavy or light chain. Exemplary additional antigen-binding units include single domain antibodies (e.g., variable heavy chain or variable light chain), engineered protein scaffolds, and paired antibody variable domains (e.g., single chain variable fragments or variable fragments). See Id. Examples of appended IgG formats include dual variable domain IgG (DVD-Ig), IgG(H)-scFv, scFv-(H)IgG, IgG(L)-scFv, scFv-(L)IgG, IgG(L,H)-Fv, IgG(H)-V, V(H)-IgG, IgG(L)-V, V(L)-IgG, KIH IgG-scFab, 2scFv-IgG, IgG-2scFv, scFv4-Ig, zybody, and DVI-IgG (four-in-one). See Spiess et al. Mol. Immunol. 67(2015):95-106. An example of an IgG-scFv is MM-141 (Merrimack Pharmaceuticals), which binds IGF-1R and HER3. Examples of DVD-Ig include ABT-981 (AbbVie), which binds IL-1α and IL-1β; and ABT-122 (AbbVie), which binds TNF and IL-17A.

[0256] Bispecific antibody fragments (BsAb) are a format of bispecific antibody molecules that lack some or all of the antibody constant domains. For example, some BsAb lack an Fc region. In some embodiments, bispecific antibody fragments include heavy and light chain regions that are connected by a peptide linker that permits efficient expression of the BsAb in a single host cell. Exemplary bispecific antibody fragments include but are not limited to nanobody, nanobody-HAS, BiTE, Diabody, DART, TandAb, scDiabody, scDiabody-CH3, Diabody-CH3, triple body, miniantibody, minibody, TriBi minibody, scFv-CH3 KIH, Fab-scFv, scFv-CH-CL-scFv, F(ab′)₂, F(ab′)₂-scFv2, scFv-KIH, Fab-scFv-Fc, tetravalent HCAb, scDiabody-Fc, Diabody-Fc, tandem scFv-Fc, and intrabody. See Id. For example, the BiTE format comprises tandem scFvs, where the component scFvs bind to CD3 on T cells and a surface antigen on cancer cells

[0257] Bispecific fusion proteins include antibody fragments linked to other proteins, e.g., to add additional specificity and/or functionality. An example of a bispecific fusion protein is an immTAC, which comprises an anti-CD3 scFv linked to an affinity-matured T-cell receptor that recognizes HLA-presented peptides. In some embodiments, the dock-and-lock (DNL) method can be used to generate bispecific antibody molecules with higher valency. Also, fusions to albumin binding proteins or human serum albumin can be extend the serum half-life of antibody fragments. See Id.

[0258] In some embodiments, chemical conjugation, e.g., chemical conjugation of antibodies and/or antibody fragments, can be used to create BsAb molecules. See Id. An exemplary bispecific antibody conjugate includes the CovX-body format, in which a low molecular weight drug is conjugated site-specifically to a single reactive lysine in each Fab arm or an antibody or fragment thereof. In some embodiments, the conjugation improves the serum half-life of the low molecular weight drug. An exemplary CovX-body is CVX-241 (NCT01004822), which comprises an antibody conjugated to two short peptides inhibiting either VEGF or Ang2. See Id.

[0259] The antibody molecules can be produced by recombinant expression, e.g., of at least one or more component, in a host system. Exemplary host systems include eukaryotic cells (e.g., mammalian cells, e.g., CHO cells, or insect cells, e.g., SF9 or S2 cells) and prokaryotic cells (e.g., E. coli). Bispecific antibody molecules can be produced by separate expression of the components in different host cells and subsequent purification/assembly. Alternatively, the antibody molecules can be produced by expression of the components in a single host cell. Purification of bispecific antibody molecules can be performed by various methods such as affinity chromatography, e.g., using protein A and sequential pH elution. In other embodiments, affinity tags can be used for purification, e.g., histidine-containing tag, myc tag, or streptavidin tag.

### CDR-Grafted Scaffolds

[0260] In some embodiments, the antibody molecule is a CDR-grafted scaffold domain. In some embodiments, the scaffold domain is based on a fibronectin domain, e.g., fibronectin type III domain. The overall fold of the fibronectin type III (Fn3) domain is closely related to that of the smallest functional antibody fragment, the variable domain of the antibody heavy chain. There are three loops at the end of Fn3; the positions of BC, DE and FG loops approximately correspond to those of CDR1, 2 and 3 of the VH domain of an antibody. Fn3 does not have disulfide bonds; and therefore Fn3 is stable under reducing conditions, unlike antibodies and their fragments (see, e.g., WO 98/56915; WO 01/64942; WO 00/34784). An Fn3 domain can be modified (e.g., using CDRs or hypervariable loops described herein) or varied, e.g., to select domains that bind to an antigen/marker/cell described herein.

[0261] In some embodiments, a scaffold domain, e.g., a folded domain, is based on an antibody, e.g., a “minibody” scaffold created by deleting three beta strands from a heavy chain variable domain of a monoclonal antibody (see, e.g., Tramontano et al., 1994, J Mol. Recognit. 7:9; and Martin et al., 1994, EMBO J. 13:5303-5309). The “minibody” can be used to present two hypervariable loops. In some embodiments, the scaffold domain is a V-like domain (see, e.g., Coia et al. WO 99/45110) or a domain derived from tendamistatin, which is a 74 residue, six-strand beta sheet sandwich held together by two disulfide bonds (see, e.g., McConnell and Hoess, 1995, J Mol. Biol. 250:460). For example, the loops of tendamistatin can be modified (e.g., using CDRs or hypervariable loops) or varied, e.g., to select domains that bind to a marker/antigen/cell described herein. Another exemplary scaffold domain is a beta-sandwich structure derived from the extracellular domain of CTLA-4 (see, e.g., WO 00/60070).

[0262] Other exemplary scaffold domains include but are not limited to T-cell receptors; MHC proteins; extracellular domains (e.g., fibronectin Type III repeats, EGF repeats); protease inhibitors (e.g., Kunitz domains, ecotin, BPTI, and so forth); TPR repeats; trifoil structures; zinc finger domains; DNA-binding proteins; particularly monomeric DNA binding proteins; RNA binding proteins; enzymes, e.g., proteases (particularly inactivated proteases), RNase; chaperones, e.g., thioredoxin, and heat shock proteins; and intracellular signaling domains (such as SH2 and SH3 domains). See, e.g., US 20040009530 and U.S. Pat. No. 7,501,121, incorporated herein by reference.

[0263] In some embodiments, a scaffold domain is evaluated and chosen, e.g., by one or more of the following criteria: (1) amino acid sequence, (2) sequences of several homologous domains, (3) 3-dimensional structure, and/or (4) stability data over a range of pH, temperature, salinity, organic solvent, oxidant concentration. In some embodiments, the scaffold domain is a small, stable protein domain, e.g., a protein of less than 100, 70, 50, 40 or 30 amino acids. The domain may include one or more disulfide bonds or may chelate a metal, e.g., zinc.

### Antibody-Based Fusions

[0264] A variety of formats can be generated which contain additional binding entities attached to the N or C terminus of antibodies. These fusions with single chain or disulfide stabilized Fvs or Fabs result in the generation of tetravalent molecules with bivalent binding specificity for each antigen. Combinations of scFvs and scFabs with IgGs enable the production of molecules which can recognize three or more different antigens.

### Antibody-Fab Fusion

[0265] Antibody-Fab fusions are bispecific antibodies comprising a traditional antibody to a first target and a Fab to a second target fused to the C terminus of the antibody heavy chain. Commonly the antibody and the Fab will have a common light chain. Antibody fusions can be produced by (1) engineering the DNA sequence of the target fusion, and (2) transfecting the target DNA into a suitable host cell to express the fusion protein. It seems like the antibody-scFv fusion may be linked by a (Gly)-Ser linker between the C-terminus of the CH3 domain and the N-terminus of the scFv, as described by Coloma, J. et al. (1997) Nature Biotech 15:159.

### Antibody-scFv Fusion

[0266] Antibody-scFv Fusions are bispecific antibodies comprising a traditional antibody and a scFv of unique specificity fused to the C terminus of the antibody heavy chain. The scFv can be fused to the C terminus through the Heavy Chain of the scFv either directly or through a linker peptide. Antibody fusions can be produced by (1) engineering the DNA sequence of the target fusion, and (2) transfecting the target DNA into a suitable host cell to express the fusion protein. It seems like the antibody-scFv fusion may be linked by a (Gly)-Ser linker between the C-terminus of the CH3 domain and the N-terminus of the scFv, as described by Coloma, J. et al. (1997) Nature Biotech 15:159.

### Variable Domain Immunoglobulin DVD

[0267] A related format is the dual variable domain immunoglobulin (DVD), which are composed of VH and VL domains of a second specificity place upon the N termini of the V domains by shorter linker sequences.

[0268] Other exemplary multispecific antibody formats include, e.g., those described in the following US20160114057A1, US20130243775A1, US20140051833, US20130022601, US20150017187A1, US20120201746A1, US20150133638A1, US20130266568A1, US20160145340A1, WO2015127158A1, US20150203591A1, US20140322221A1, US20130303396A1, US20110293613, US20130017200A1, US20160102135A1, WO2015197598A2, WO2015197582A1, U.S. Pat. No. 9,359,437, US20150018529, WO2016115274A1, WO2016087416A1, US20080069820A1, U.S. Pat. Nos. 9,145,588B, 7,919,257, and US20150232560A1. Exemplary multispecific molecules utilizing a full antibody-Fab/scFab format include those described in the following, U.S. Pat. No. 9,382,323B2, US20140072581A1, US20140308285A1, US20130165638A1, US20130267686A1, US20140377269A1, U.S. Pat. No. 7,741,446B2, and WO1995009917A1. Exemplary multispecific molecules utilizing a domain exchange format include those described in the following, US20150315296A1, WO2016087650A1, US20160075785A1, WO2016016299A1, US20160130347A1, US20150166670, U.S. Pat. No. 8,703,132B2, US20100316645, U.S. Pat. No. 8,227,577B2, US20130078249.

### Fc-Containing Entities (Mini-Antibodies)

[0269] Fc-containing entities, also known as mini-antibodies, can be generated by fusing scFv to the C-termini of constant heavy region domain 3 (CH3-scFv) and/or to the hinge region (scFv-hinge-Fc) of an antibody with a different specificity. Trivalent entities can also be made which have disulfide stabilized variable domains (without peptide linker) fused to the C-terminus of CH3 domains of IgGs.

### Fc-Containing Multispecific Molecules

[0270] In some embodiments, the multispecific molecules disclosed herein includes an immunoglobulin constant region (e.g., an Fc region). Exemplary Fc regions can be chosen from the heavy chain constant regions of IgG1, IgG2, IgG3 or IgG4; more particularly, the heavy chain constant region of human IgG1, IgG2, IgG3, or IgG4.

[0271] In some embodiments, the immunoglobulin chain constant region (e.g., the Fc region) is altered, e.g., mutated, to increase or decrease one or more of: Fc receptor binding, antibody glycosylation, the number of cysteine residues, effector cell function, or complement function.

[0272] In other embodiments, an interface of a first and second immunoglobulin chain constant regions (e.g., a first and a second Fc region) is altered, e.g., mutated, to increase or decrease dimerization, e.g., relative to a non-engineered interface, e.g., a naturally-occurring interface. For example, dimerization of the immunoglobulin chain constant region (e.g., the Fc region) can be enhanced by providing an Fc interface of a first and a second Fc region with one or more of: a paired protuberance-cavity (“knob-in-a hole”), an electrostatic interaction, or a strand-exchange, such that a greater ratio of heteromultimer to homomultimer forms, e.g., relative to a non-engineered interface.

[0273] In some embodiments, the multispecific molecules include a paired amino acid substitution at a position chosen from one or more of 347, 349, 350, 351, 366, 368, 370, 392, 394, 395, 397, 398, 399, 405, 407, or 409, e.g., of the Fc region of human IgG1 For example, the immunoglobulin chain constant region (e.g., Fc region) can include a paired an amino acid substitution chosen from: T366S, L368A, or Y407V (e.g., corresponding to a cavity or hole), and T366W (e.g., corresponding to a protuberance or knob).

[0274] In other embodiments, the multifunctional molecule includes a half-life extender, e.g., a human serum albumin or an antibody molecule to human serum albumin.

### Heterodimerized Antibody Molecules & Methods of Making

[0275] Various methods of producing multispecific antibodies have been disclosed to address the problem of incorrect heavy chain pairing. Exemplary methods are described below. Exemplary multispecific antibody formats and methods of making said multispecific antibodies are also disclosed in e.g., Speiss et al. Molecular Immunology 67 (2015) 95-106; and Klein et al mAbs 4:6, 653-663; November/December 2012; the entire contents of each of which are incorporated by reference herein.

[0276] Heterodimerized bispecific antibodies are based on the natural IgG structure, wherein the two binding arms recognize different antigens. IgG derived formats that enable defined monovalent (and simultaneous) antigen binding are generated by forced heavy chain heterodimerization, combined with technologies that minimize light chain mispairing (e.g., common light chain). Forced heavy chain heterodimerization can be obtained using, e.g., knob-in-hole OR strand exchange engineered domains (SEED).

### Knob-In-Hole

[0277] Knob-in-Hole as described in U.S. Pat. Nos. 5,731,116, 7,476,724 and Ridgway, J. et al. (1996) Prot. Engineering 9(7): 617-621, broadly involves: (1) mutating the CH3 domain of one or both antibodies to promote heterodimerization; and (2) combining the mutated antibodies under conditions that promote heterodimerization. “Knobs” or “protuberances” are typically created by replacing a small amino acid in a parental antibody with a larger amino acid (e.g., T366Y or T366W); “Holes” or “cavities” are created by replacing a larger residue in a parental antibody with a smaller amino acid (e.g., Y407T, T366S, L368A and/or Y407V).

[0278] For bispecific antibodies including an Fc domain, introduction of specific mutations into the constant region of the heavy chains to promote the correct heterodimerization of the Fc portion can be utilized. Several such techniques are reviewed in Klein et al. (mAbs (2012) 4:6, 1-11), the contents of which are incorporated herein by reference in their entirety. These techniques include the “knobs-into-holes” (KiH) approach which involves the introduction of a bulky residue into one of the CH3 domains of one of the antibody heavy chains. This bulky residue fits into a complementary “hole” in the other CH3 domain of the paired heavy chain so as to promote correct pairing of heavy chains (see e.g., U.S. Pat. No. 7,642,228).

[0279] Exemplary KiH mutations include S354C, T366W in the “knob” heavy chain and Y349C, T366S, L368A, Y407V in the “hole” heavy chain. Other exemplary KiH mutations are provided in Table 1, with additional optional stabilizing Fc cysteine mutations.

TABLE 1
Exemplary Fc KiH mutations and optional Cysteine mutations

| Position | Knob Mutation | Hole Mutation |
|---|---|---|
| T366 | T366W | T366S |
| L368 | — | L368A |
| Y407 | — | Y407V |

Additional Cysteine Mutations to form a stabilizing disulfide bridge

| Position | Knob CH3 | Hole CH3 |
|---|---|---|
| S354 | S354C | — |
| Y349 | — | Y349C |

[0280] Other Fe mutations are provided by Igawa and Tsunoda who identified 3 negatively charged residues in the CH3 domain of one chain that pair with three positively charged residues in the CH3 domain of the other chain. These specific charged residue pairs are: E356-K439, E357-K370, D399-K409 and vice versa. By introducing at least two of the following three mutations in chain A: E356K, E357K and D399K, as well as K370E, K409D, K439E in chain B, alone or in combination with newly identified disulfide bridges, they were able to favor very efficient heterodimerization while suppressing homodimerization at the same time (Martens T et al. A novel one-armed antic-Met antibody inhibits glioblastoma growth in vivo. Clin Cancer Res 2006; 12:6144-52; PMID: 17062691). Xencor defined 41 variant pairs based on combining structural calculations and sequence information that were subsequently screened for maximal heterodimerization, defining the combination of S364H, F405A (HA) on chain A and Y349T, T394F on chain B (TF) (Moore G L et al. A novel bispecific antibody format enables simultaneous bivalent and monovalent co-engagement of distinct target antigens. MAbs 2011; 3:546-57; PMID: 22123055).

[0281] Other exemplary Fc mutations to promote heterodimerization of multispecific antibodies include those described in the following references, the contents of each of which is incorporated by reference herein, WO2016071377A1, US20140079689A1, US20160194389A1, US20160257763, WO2016071376A2, WO2015107026A1, WO2015107025A1, WO2015107015A1, US20150353636A1, US20140199294A1, U.S. Pat. No. 7,750,128B2, US20160229915A1, US20150344570A1, U.S. Pat. No. 8,003,774A1, US20150337049A1, US20150175707A1, US20140242075A1, US20130195849A1, US20120149876A1, US20140200331A1, U.S. Pat. No. 9,309,311B2, U.S. Pat. No. 8,586,713, US20140037621A1, US20130178605A1, US20140363426A1, US20140051835A1 and US20110054151A1.

[0282] Stabilizing cysteine mutations have also been used in combination with KiH and other Fc heterodimerization promoting variants, see e.g., U.S. Pat. No. 7,183,076. Other exemplary cysteine modifications include, e.g., those disclosed in US20140348839A1, U.S. Pat. No. 7,855,275B2, and U.S. Pat. No. 9,000,130B2.

### Strand Exchange Engineered Domains (SEED)

[0283] Heterodimeric Fc platform that support the design of bispecific and asymmetric fusion proteins by devising strand-exchange engineered domain (SEED) C(H)3 heterodimers are known. These derivatives of human IgG and IgA C(H)3 domains create complementary human SEED C(H)3 heterodimers that are composed of alternating segments of human IgA and IgG C(H)3 sequences. The resulting pair of SEED C(H)3 domains preferentially associates to form heterodimers when expressed in mammalian cells. SEEDbody (Sb) fusion proteins consist of [IgG1 hinge]-C(H)2-[SEED C(H)3], that may be genetically linked to one or more fusion partners (see e.g., Davis J H et al. SEEDbodies: fusion proteins based on strand exchange engineered domain (SEED) CH3 heterodimers in an Fc analogue platform for asymmetric binders or immunofusions and bispecific antibodies. Protein Eng Des Sel 2010; 23:195-202; PMID:20299542 and U.S. Pat. No. 8,871,912. The contents of each of which are incorporated by reference herein).

### Duobody

[0284] “Duobody” technology to produce bispecific antibodies with correct heavy chain pairing are known. The DuoBody technology involves three basic steps to generate stable bispecific human IgG1 antibodies in a post-production exchange reaction. In a first step, two IgG1s, each containing single matched mutations in the third constant (CH3) domain, are produced separately using standard mammalian recombinant cell lines. Subsequently, these IgG1 antibodies are purified according to standard processes for recovery and purification. After production and purification (post-production), the two antibodies are recombined under tailored laboratory conditions resulting in a bispecific antibody product with a very high yield (typically >95%) (see e.g., Labrijn et al, PNAS 2013; 110(13):5145-5150 and Labrijn et al. Nature Protocols 2014; 9(10):2450-63, the contents of each of which are incorporated by reference herein).

### Electrostatic Interactions

[0285] Methods of making multispecific antibodies using CH3 amino acid changes with charged amino acids such that homodimer formation is electrostatically unfavorable are disclosed. EP1870459 and WO 2009089004 describe other strategies for favoring heterodimer formation upon co-expression of different antibody domains in a host cell. In these methods, one or more residues that make up the heavy chain constant domain 3 (CH3), CH3-CH3 interfaces in both CH3 domains are replaced with a charged amino acid such that homodimer formation is electrostatically unfavorable and heterodimerization is electrostatically favorable. Additional methods of making multispecific molecules using electrostatic interactions are described in the following references, the contents of each of which is incorporated by reference herein, include US20100015133, U.S. Pat. No. 8,592,562B2, U.S. Pat. No. 9,200,060B2, US20140154254A1, and U.S. Pat. No. 9,358,286A1.

### Common Light Chain

[0286] Light chain mispairing needs to be avoided to generate homogenous preparations of bispecific IgGs. One way to achieve this is through the use of the common light chain principle, i.e. combining two binders that share one light chain but still have separate specificities. An exemplary method of enhancing the formation of a desired bispecific antibody from a mixture of monomers is by providing a common variable light chain to interact with each of the heteromeric variable heavy chain regions of the bispecific antibody. Compositions and methods of producing bispecific antibodies with a common light chain as disclosed in, e.g., U.S. Pat. No. 7,183,076B2, US20110177073A1, EP2847231A1, WO2016079081A1, and EP3055329A1, the contents of each of which is incorporated by reference herein.

### CrossMab

[0287] Another option to reduce light chain mispairing is the CrossMab technology which avoids non-specific L chain mispairing by exchanging CH1 and CL domains in the Fab of one half of the bispecific antibody. Such crossover variants retain binding specificity and affinity, but make the two arms so different that L chain mispairing is prevented. The CrossMab technology (as reviewed in Klein et al. Supra) involves domain swapping between heavy and light chains so as to promote the formation of the correct pairings. Briefly, to construct a bispecific IgG-like CrossMab antibody that could bind to two antigens by using two distinct light chain-heavy chain pairs, a two-step modification process is applied. First, a dimerization interface is engineered into the C-terminus of each heavy chain using a heterodimerization approach, e.g., Knob-into-hole (KiH) technology, to ensure that only a heterodimer of two distinct heavy chains from one antibody (e.g., Antibody A) and a second antibody (e.g., Antibody B) is efficiently formed. Next, the constant heavy 1 (CH1) and constant light (CL) domains of one antibody are exchanged (Antibody A), keeping the variable heavy (VH) and variable light (VL) domains consistent. The exchange of the CH1 and CL domains ensured that the modified antibody (Antibody A) light chain would only efficiently dimerize with the modified antibody (antibody A) heavy chain, while the unmodified antibody (Antibody B) light chain would only efficiently dimerize with the unmodified antibody (Antibody B) heavy chain; and thus only the desired bispecific CrossMab would be efficiently formed (see e.g., Cain, C. SciBX 4(28); doi:10.1038/scibx.2011.783, the contents of which are incorporated by reference herein).

### Common Heavy Chain

[0288] An exemplary method of enhancing the formation of a desired bispecific antibody from a mixture of monomers is by providing a common variable heavy chain to interact with each of the heteromeric variable light chain regions of the bispecific antibody. Compositions and methods of producing bispecific antibodies with a common heavy chain are disclosed in, e.g., US20120184716, US20130317200, and US20160264685A1, the contents of each of which is incorporated by reference herein.

### Amino Acid Modifications

[0289] Alternative compositions and methods of producing multispecific antibodies with correct light chain pairing include various amino acid modifications. For example, Zymeworks describes heterodimers with one or more amino acid modifications in the CH1 and/or CL domains, one or more amino acid modifications in the VH and/or VL domains, or a combination thereof, which are part of the interface between the light chain and heavy chain and create preferential pairing between each heavy chain and a desired light chain such that when the two heavy chains and two light chains of the heterodimer pair are co-expressed in a cell, the heavy chain of the first heterodimer preferentially pairs with one of the light chains rather than the other (see e.g., WO2015181805). Other exemplary methods are described in WO2016026943 (Argen-X), US20150211001, US20140072581A1, US20160039947A1, and US20150368352.

### Lambda Kappa Formats

[0290] Multispecific molecules (e.g., multispecific antibody molecules) that include the lambda light chain polypeptide and a kappa light chain polypeptides, can be used to allow for heterodimerization. Methods for generating bispecific antibody molecules comprising the lambda light chain polypeptide and a kappa light chain polypeptides are disclosed in PCT Publication No. WO2018057955 (corresponding to PCT/US17/53053, filed on Sep. 22, 2017), incorporated herein by reference in its entirety.

[0291] In some embodiments, the multispecific molecules includes a multispecific antibody molecule, e.g., an antibody molecule comprising two binding specificities, e.g., a bispecific antibody molecule. The multispecific antibody molecule includes:
[0292] a lambda light chain polypeptide 1 (LLCP1) specific for a first epitope;
   [0293] a heavy chain polypeptide 1 (HCP1) specific for the first epitope;
   [0294] a kappa light chain polypeptide 2 (KLCP2) specific for a second epitope; and
   [0295] a heavy chain polypeptide 2 (HCP2) specific for the second epitope.

[0296] “Lambda light chain polypeptide 1 (LLCP1)”, as that term is used herein, refers to a polypeptide comprising sufficient light chain (LC) sequence, such that when combined with a cognate heavy chain variable region, can mediate specific binding to its epitope and complex with an HCP1. In an embodiment it comprises all or a fragment of a CH1 region. In an embodiment, an LLCP1 comprises LC-CDR1, LC-CDR2, LC-CDR3, FR1, FR2, FR3, FR4, and CH1, or sufficient sequence therefrom to mediate specific binding of its epitope and complex with an HCP1. LLCP1, together with its HCP1, provide specificity for a first epitope (while KLCP2, together with its HCP2, provide specificity for a second epitope). As described elsewhere herein, LLCP1 has a higher affinity for HCP1 than for HCP2.

[0297] “Kappa light chain polypeptide 2 (KLCP2)”, as that term is used herein, refers to a polypeptide comprising sufficient light chain (LC) sequence, such that when combined with a cognate heavy chain variable region, can mediate specific binding to its epitope and complex with an HCP2. In an embodiments it comprises all or a fragment of a CH1 region. In an embodiment, a KLCP2 comprises LC-CDR1, LC-CDR2, LC-CDR3, FR1, FR2, FR3, FR4, and CH1, or sufficient sequence therefrom to mediate specific binding of its epitope and complex with an HCP2. KLCP2, together with its HCP2, provide specificity for a second epitope (while LLCP1, together with its HCP1, provide specificity for a first epitope).

[0298] “Heavy chain polypeptide 1 (HCP1)”, as that term is used herein, refers to a polypeptide comprising sufficient heavy chain (HC) sequence, e.g., HC variable region sequence, such that when combined with a cognate LLCP1, can mediate specific binding to its epitope and complex with an HCP1. In an embodiments it comprises all or a fragment of a CH1 region. In an embodiment, it comprises all or a fragment of a CH2 and/or CH3 region. In an embodiment an HCP1 comprises HC-CDR1, HC-CDR2, HC-CDR3, FR1, FR2, FR3, FR4, CH1, CH2, and CH3, or sufficient sequence therefrom to: (i) mediate specific binding of its epitope and complex with an LLCP1, (ii) to complex preferentially, as described herein to LLCP1 as opposed to KLCP2; and (iii) to complex preferentially, as described herein, to an HCP2, as opposed to another molecule of HCP1. HCP1, together with its LLCP1, provide specificity for a first epitope (while KLCP2, together with its HCP2, provide specificity for a second epitope).

[0299] “Heavy chain polypeptide 2 (HCP2)”, as that term is used herein, refers to a polypeptide comprising sufficient heavy chain (HC) sequence, e.g., HC variable region sequence, such that when combined with a cognate LLCP1, can mediate specific binding to its epitope and complex with an HCP1. In an embodiments it comprises all or a fragment of a CH1 region. In an embodiments it comprises all or a fragment of a CH2 and/or CH3 region. In an embodiment an HCP1 comprises HC-CDR1, HC-CDR2, HC-CDR3, FR1, FR2, FR3, FR4, CH1, CH2, and CH3, or sufficient sequence therefrom to: (i) mediate specific binding of its epitope and complex with an KLCP2, (ii) to complex preferentially, as described herein to KLCP2 as opposed to LLCP1; and (iii) to complex preferentially, as described herein, to an HCP1, as opposed to another molecule of HCP2. HCP2, together with its KLCP2, provide specificity for a second epitope (while LLCP1, together with its HCP1, provide specificity for a first epitope).

[0300] In some embodiments of the multispecific antibody molecule disclosed herein:
[0301] LLCP1 has a higher affinity for HCP1 than for HCP2; and/or
[0302] KLCP2 has a higher affinity for HCP2 than for HCP1.

[0303] In some embodiments, the affinity of LLCP1 for HCP1 is sufficiently greater than its affinity for HCP2, such that under preselected conditions, e.g., in aqueous buffer, e.g., at pH 7, in saline, e.g., at pH 7, or under physiological conditions, at least 75, 80, 90, 95, 98, 99, 99.5, or 99.9% of the multispecific antibody molecule molecules have a LLCP1 complexed, or interfaced with, a HCP1.

[0304] In some embodiments of the multispecific antibody molecule disclosed herein: the HCP1 has a greater affinity for HCP2, than for a second molecule of HCP1; and/or
[0305] the HCP2 has a greater affinity for HCP1, than for a second molecule of HCP2.

[0306] In some embodiments, the affinity of HCP1 for HCP2 is sufficiently greater than its affinity for a second molecule of HCP1, such that under preselected conditions, e.g., in aqueous buffer, e.g., at pH 7, in saline, e.g., at pH 7, or under physiological conditions, at least 75%, 80, 90, 95, 98, 99 99.5 or 99.9% of the multispecific antibody molecule molecules have a HCP1 complexed, or interfaced with, a HCP2.

[0307] In another aspect, disclosed herein is a method for making, or producing, a multispecific antibody molecule. The method includes:
[0308] (i) providing a first heavy chain polypeptide (e.g., a heavy chain polypeptide comprising one, two, three or all of a first heavy chain variable region (first VH), a first CH1, a first heavy chain constant region (e.g., a first CH2, a first CH3, or both));
[0309] (ii) providing a second heavy chain polypeptide (e.g., a heavy chain polypeptide comprising one, two, three or all of a second heavy chain variable region (second VH), a second CH1, a second heavy chain constant region (e.g., a second CH2, a second CH3, or both));
[0310] (iii) providing a lambda chain polypeptide (e.g., a lambda light variable region (VL□), a lambda light constant chain (VL□), or both) that preferentially associates with the first heavy chain polypeptide (e.g., the first VH); and
[0311] (iv) providing a kappa chain polypeptide (e.g., a lambda light variable region (VL□), a lambda light constant chain (VL□), or both) that preferentially associates with the second heavy chain polypeptide (e.g., the second VH), under conditions where (i)-(iv) associate.

[0312] In some embodiments, the first and second heavy chain polypeptides form an Fc interface that enhances heterodimerization.

[0313] In some embodiments, (i)-(iv) (e.g., nucleic acid encoding (i)-(iv)) are introduced in a single cell, e.g., a single mammalian cell, e.g., a CHO cell. In some embodiments, (i)-(iv) are expressed in the cell.

[0314] In some embodiments, (i)-(iv) (e.g., nucleic acid encoding (i)-(iv)) are introduced in different cells, e.g., different mammalian cells, e.g., two or more CHO cell. In some embodiments, (i)-(iv) are expressed in the cells.

[0315] In one embodiment, the method further comprises purifying a cell-expressed antibody molecule, e.g., using a lambda- and/or kappa-specific purification, e.g., affinity chromatography.

[0316] In some embodiments, the method further comprises evaluating the cell-expressed multispecific antibody molecule. For example, the purified cell-expressed multispecific antibody molecule can be analyzed by techniques known in the art, include mass spectrometry. In one embodiment, the purified cell-expressed antibody molecule is cleaved, e.g., digested with papain to yield the Fab moieties and evaluated using mass spectrometry.

[0317] In some embodiments, the method produces correctly paired kappa/lambda multispecific, e.g., bispecific, antibody molecules in a high yield, e.g., at least 75%, 80, 90, 95, 98, 99 99.5 or 99.9%.

[0318] In other embodiments, the multispecific, e.g., a bispecific, antibody molecule that includes:
[0319] (i) a first heavy chain polypeptide (HCP1) (e.g., a heavy chain polypeptide comprising one, two, three or all of a first heavy chain variable region (first VH), a first CH1, a first heavy chain constant region (e.g., a first CH2, a first CH3, or both)), e.g., wherein the HCP1 binds to a first epitope;
[0320] (ii) a second heavy chain polypeptide (HCP2) (e.g., a heavy chain polypeptide comprising one, two, three or all of a second heavy chain variable region (second VH), a second CH1, a second heavy chain constant region (e.g., a second CH2, a second CH3, or both)), e.g., wherein the HCP2 binds to a second epitope;
[0321] (iii) a lambda light chain polypeptide (LLCP1) (e.g., a lambda light variable region (VL1), a lambda light constant chain (VL1), or both) that preferentially associates with the first heavy chain polypeptide (e.g., the first VH), e.g., wherein the LLCP1 binds to a first epitope; and
[0322] (iv) a kappa light chain polypeptide (KLCP2) (e.g., a lambda light variable region (VLk), a lambda light constant chain (VLk), or both) that preferentially associates with the second heavy chain polypeptide (e.g., the second VH), e.g., wherein the KLCP2 binds to a second epitope.

[0323] In some embodiments, the first and second heavy chain polypeptides form an Fc interface that enhances heterodimerization. In some embodiments, the multispecific antibody molecule has a first binding specificity that includes a hybrid VL1-CL1 heterodimerized to a first heavy chain variable region connected to the Fc constant, CH2-CH3 domain (having a knob modification) and a second binding specificity that includes a hybrid VLk-CLk heterodimerized to a second heavy chain variable region connected to the Fc constant, CH2-CH3 domain (having a hole modification).

### Calreticulin-Targeting Antigen Binding Domains

[0324] The present disclosure provides, inter alia, multispecific (e.g., bi-, tri-, tetra-specific) or multifunctional molecules, that include, e.g., are engineered to contain, one or more antigen binding domains that bind to calreticulin, e.g., a wild-type calreticulin protein or a calreticulin mutant protein. In some embodiments, the multifunctional molecule binds to a wild-type calreticulin protein and a calreticulin mutant protein with similar affinity. In some embodiments, the multifunctional molecule preferentially binds to a calreticulin mutant protein over a wild type calreticulin protein.

[0325] An exemplary wild type human calreticulin is shown as SEQ ID NO: 6285.

(SEQ ID NO: 6285)
EPAVYFKEQFLDGDGWTSRWIESKHKSDFGKFVLSSGKFYGDEEKDKGLQ
TSQDARFYALSASFEPFSNKGQTLVVQFTVKHEQNIDCGGGYVKLFPNSL
DQTDMHGDSEYNIMFGPDICGPGTKKVHVIFNYKGKNVLINKDIRCKDDE
FTHLYTLIVRPDNTYEVKIDNSQVESGSLEDDWDFLPPKKIKDPDASKPE
DWDERAKIDDPTDSKPEDWDKPEHIPDPDAKKPEDWDEEMDGEWEPPVIQ
NPEYKGEWKPRQIDNPDYKGTWIHPEIDNPEYSPDPSIYAYDNFGVLGLD
LWQVKSGTIFDNFLITNDEAYAEEFGNETWGVTKAAEKQMKDKQDEEQRL
KEEEEDKKRKEEEEAEDKEDDEDKDEDEEDEEDKEEDEEEDVPGQAKDEL

[0326] An additional exemplary wild type human calreticulin is shown as SEQ ID NO: 1001:

(SEQ ID NO: 1001)
MLLSVPLLLGLLGLAVAHHHHHHHHGGGGSEPAVYFKEQFLDGDGWTSRW
IESKHKSDFGKFVLSSGKFYGDEEKDKGLQTSQDARFYALSASFEPFSNK
GQTLVVQFTVKHEQNIDCGGGYVKLFPNSLDQTDMHGDSEYNIMFGPDIC
GPGTKKVHVIFNYKGKNVLINKDIRCKDDEFTHLYTLIVRPDNTYEVKID
NSQVESGSLEDDWDFLPPKKIKDPDASKPEDWDERAKIDDPTDSKPEDWD
KPEHIPDPDAKKPEDWDEEMDGEWEPPVIQNPEYKGEWKPRQIDNPDYKG
TWIHPEIDNPEYSPDPSIYAYDNFGVLGLDLWQVKSGTIFDNFLITNDEA
YAEEFGNETWGVTKAAEKQMKDKQDEEQRLKEEEEDKKRKEEEEAEDKED
DEDKDEDEEDEEDKEEDEEEDVPGQA

[0327] Calreticulin mutant proteins have been identified and found to be associated with myeloid cancers, e.g., see Nangalia et al., N Engl J Med. 2013 Dec. 19; 369(25):2391-2405, Klampfl et al., N Engl J Med. 2013 Dec. 19; 369(25):2379-90, and US20170269092, herein incorporated by reference in their entirety. Mutant calreticulin has a frameshift in exon 9 of the coding sequence of wild type calreticulin, resulting in the replacement of the C-terminal negatively charged amino acids of wild type calreticulin by a predominantly positively charged polypeptide. Table 2 discloses full-length amino acid sequences of 38 calreticulin mutant proteins. Table 3 discloses the C-terminal amino acid sequences of the 36 calreticulin mutant proteins. All 38 calreticulin mutant proteins comprise the amino acid sequence of RRKMSPARPRTSCREACLQGWTEA (SEQ ID NO: 6286).

[0328] The predominant mutations of calreticulin are Type 1 and Type 2 mutations (see Tables 2 and 3). Type 1 mutation is a 52-bp deletion (c.1092_1143del) whereas Type 2 mutation is a 5-bp insertion (c.1154_1155insTTGTC).

TABLE 2
Full-length amino acid sequences of calreticulin mutants

| SEQ | | |
|---|---|---|
| ID NO | Type | Full length sequences of insertion/deletion frameshift mutations of calreticulin |
| SEQ | Type 1 | EPAVYFKEQFLDGDGWTSRWIESKHKSDFGKFVLSSGKFYGDEEKDKGL |
| ID NO: | | QTSQDARFYALSASFEPFSNKGQTLVVQFTVKHEQNIDCGGGYVKLFPNS |
| 6313 | | LDQTDMHGDSEYNIMFGPDICGPGTKKVHVIFNYKGKNVLINKDIRCKD |
| | | DEFTHLYTLIVRPDNTYEVKIDNSQVESGSLEDDWDFLPPKKIKDPDASK |
| | | PEDWDERAKIDDPTDSKPEDWDKPEHIPDPDAKKPEDWDEEMDGEWEP |
| | | PVIQNPEYKGEWKPRQIDNPDYKGTWIHPEIDNPEYSPDPSIYAYDNFGV |
| | | LGLDLWQVKSGTIFDNFLITNDEAYAEEFGNETWGVTKAAEKQMKDKQ |
| | | DEEQRTRRMMRTKMRMRRMRRTRRKMRRKMSPARPRTSCREACLQG |
| | | WTEA |
| SEQ | Type 2 | EPAVYFKEQFLDGDGWTSRWIESKHKSDFGKFVLSSGKFYGDEEKDKGL |
| ID NO: | | QTSQDARFYALSASFEPFSNKGQTLVVQFTVKHEQNIDCGGGYVKLFPNS |
| 6314 | | LDQTDMHGDSEYNIMFGPDICGPGTKKVHVIFNYKGKNVLINKDIRCKD |
| | | DEFTHLYTLIVRPDNTYEVKIDNSQVESGSLEDDWDFLPPKKIKDPDASK |
| | | PEDWDERAKIDDPTDSKPEDWDKPEHIPDPDAKKPEDWDEEMDGEWEP |
| | | PVIQNPEYKGEWKPRQIDNPDYKGTWIHPEIDNPEYSPDPSIYAYDNFGV |
| | | LGLDLWQVKSGTIFDNFLITNDEAYAEEFGNETWGVTKAAEKQMKDKQ |
| | | DEEQRLKEEEEDKKRKEEEEAEDNCRRMMRTKMRMRRMRRTRRKMRR |
| | | KMSPARPRTSCREACLQGWTEA |
| SEQ | Type 3 | EPAVYFKEQFLDGDGWTSRWIESKHKSDFGKFVLSSGKFYGDEEKDKGL |
| ID NO: | | QTSQDARFYALSASFEPFSNKGQTLVVQFTVKHEQNIDCGGGYVKLFPNS |
| 6315 | | LDQTDMHGDSEYNIMFGPDICGPGTKKVHVIFNYKGKNVLINKDIRCKD |
| | | DEFTHLYTLIVRPDNTYEVKIDNSQVESGSLEDDWDFLPPKKIKDPDASK |
| | | PEDWDERAKIDDPTDSKPEDWDKPEHIPDPDAKKPEDWDEEMDGEWEP |
| | | PVIQNPEYKGEWKPRQIDNPDYKGTWIHPEIDNPEYSPDPSIYAYDNFGV |
| | | LGLDLWQVKSGTIFDNFLITNDEAYAEEFGNETWGVTKAAEKQMKDKQ |
| | | DEEQRQRTRRMMRTKMRMRRMRRTRRKMRRKMSPARPRTSCREACLQ |
| | | GWTEA |
| SEQ | Type 4 | EPAVYFKEQFLDGDGWTSRWIESKHKSDFGKFVLSSGKFYGDEEKDKGL |
| ID NO: | | QTSQDARFYALSASFEPFSNKGQTLVVQFTVKHEQNIDCGGGYVKLFPNS |
| 6316 | | LDQTDMHGDSEYNIMFGPDICGPGTKKVHVIFNYKGKNVLINKDIRCKD |
| | | DEFTHLYTLIVRPDNTYEVKIDNSQVESGSLEDDWDFLPPKKIKDPDASK |
| | | PEDWDERAKIDDPTDSKPEDWDKPEHIPDPDAKKPEDWDEEMDGEWEP |
| | | PVIQNPEYKGEWKPRQIDNPDYKGTWIHPEIDNPEYSPDPSIYAYDNFGV |
| | | LGLDLWQVKSGTIFDNFLITNDEAYAEEFGNETWGVTKAAEKQMKDKQ |
| | | DEEQRLRRRQRTRRMMRTKMRMRRMRRTRRKMRRKMSPARPRTSCRE |
| | | ACLQGWTEA |
| SEQ | Type 5 | EPAVYFKEQFLDGDGWTSRWIESKHKSDFGKFVLSSGKFYGDEEKDKGL |
| ID NO: | | QTSQDARFYALSASFEPFSNKGQTLVVQFTVKHEQNIDCGGGYVKLFPNS |
| 6317 | | LDQTDMHGDSEYNIMFGPDICGPGTKKVHVIFNYKGKNVLINKDIRCKD |
| | | DEFTHLYTLIVRPDNTYEVKIDNSQVESGSLEDDWDFLPPKKIKDPDASK |
| | | PEDWDERAKIDDPTDSKPEDWDKPEHIPDPDAKKPEDWDEEMDGEWEP |
| | | PVIQNPEYKGEWKPRQIDNPDYKGTWIHPEIDNPEYSPDPSIYAYDNFGV |
| | | LGLDLWQVKSGTIFDNFLITNDEAYAEEFGNETWGVTKAAEKQMKDKQ |
| | | DEGQRTRRMMRTKMRMRRMRRTRRKMRRKMSPARPRTSCREACLQG |
| | | WTEA |
| SEQ | Type 6 | EPAVYFKEQFLDGDGWTSRWIESKHKSDFGKFVLSSGKFYGDEEKDKGL |
| ID NO: | | QTSQDARFYALSASFEPFSNKGQTLVVQFTVKHEQNIDCGGGYVKLFPNS |
| 6318 | | LDQTDMHGDSEYNIMFGPDICGPGTKKVHVIFNYKGKNVLINKDIRCKD |
| | | DEFTHLYTLIVRPDNTYEVKIDNSQVESGSLEDDWDFLPPKKIKDPDASK |
| | | PEDWDERAKIDDPTDSKPEDWDKPEHIPDPDAKKPEDWDEEMDGEWEP |
| | | PVIQNPEYKGEWKPRQIDNPDYKGTWIHPEIDNPEYSPDPSIYAYDNFGV |
| | | LGLDLWQVKSGTIFDNFLITNDEAYAEEFGNETWGVTKAAEKQMKDKQ |
| | | DEERRQRTRRMMRTKMRMRRMRRTRRKMRRKMSPARPRTSCREACLQ |
| | | GWTEA |
| SEQ | Type 7 | EPAVYFKEQFLDGDGWTSRWIESKHKSDFGKFVLSSGKFYGDEEKDKGL |
| ID NO: | | QTSQDARFYALSASFEPFSNKGQTLVVQFTVKHEQNIDCGGGYVKLFPNS |
| 6319 | | LDQTDMHGDSEYNIMFGPDICGPGTKKVHVIFNYKGKNVLINKDIRCKD |
| | | DEFTHLYTLIVRPDNTYEVKIDNSQVESGSLEDDWDFLPPKKIKDPDASK |
| | | PEDWDERAKIDDPTDSKPEDWDKPEHIPDPDAKKPEDWDEEMDGEWEP |
| | | PVIQNPEYKGEWKPRQIDNPDYKGTWIHPEIDNPEYSPDPSIYAYDNFGV |
| | | LGLDLWQVKSGTIFDNFLITNDEAYAEEFGNETWGVTKAAEKQMKDKQ |
| | | DEEQRLRRMMRTKMRMRRMRRTRRKMRRKMSPARPRTSCREACLQG |
| | | WTEA |
| SEQ | Type 8 | EPAVYFKEQFLDGDGWTSRWIESKHKSDFGKFVLSSGKFYGDEEKDKGL |
| ID NO: | | QTSQDARFYALSASFEPFSNKGQTLVVQFTVKHEQNIDCGGGYVKLFPNS |
| 6320 | | LDQTDMHGDSEYNIMFGPDICGPGTKKVHVIFNYKGKNVLINKDIRCKD |
| | | DEFTHLYTLIVRPDNTYEVKIDNSQVESGSLEDDWDFLPPKKIKDPDASK |
| | | PEDWDERAKIDDPTDSKPEDWDKPEHIPDPDAKKPEDWDEEMDGEWEP |
| | | PVIQNPEYKGEWKPRQIDNPDYKGTWIHPEIDNPEYSPDPSIYAYDNFGV |
| | | LGLDLWQVKSGTIFDNFLITNDEAYAEEFGNETWGVTKAAEKQMKDKQ |
| | | DEEQRLKRRQRTRRMMRTKMRMRRMRRTRRKMRRKMSPARPRTSCRE |
| | | ACLQGWTEA |
| SEQ | Type 9 | EPAVYFKEQFLDGDGWTSRWIESKHKSDFGKFVLSSGKFYGDEEKDKGL |
| ID NO: | | QTSQDARFYALSASFEPFSNKGQTLVVQFTVKHEQNIDCGGGYVKLFPNS |
| 6321 | | LDQTDMHGDSEYNIMFGPDICGPGTKKVHVIFNYKGKNVLINKDIRCKD |
| | | DEFTHLYTLIVRPDNTYEVKIDNSQVESGSLEDDWDFLPPKKIKDPDASK |
| | | PEDWDERAKIDDPTDSKPEDWDKPEHIPDPDAKKPEDWDEEMDGEWEP |
| | | PVIQNPEYKGEWKPRQIDNPDYKGTWIHPEIDNPEYSPDPSIYAYDNFGV |
| | | LGLDLWQVKSGTIFDNFLITNDEAYAEEFGNETWGVTKAAEKQMKDKQ |
| | | DEEQRLKEEEEDKKRKEEERQRTRRMMRTKMRMRRMRRTRRKMRRK |
| | | MSPARPRTSCREACLQGWTEA |
| SEQ | Type | EPAVYFKEQFLDGDGWTSRWIESKHKSDFGKFVLSSGKFYGDEEKDKGL |
| ID NO: | 10 | QTSQDARFYALSASFEPFSNKGQTLVVQFTVKHEQNIDCGGGYVKLFPNS |
| 6322 | | LDQTDMHGDSEYNIMFGPDICGPGTKKVHVIFNYKGKNVLINKDIRCKD |
| | | DEFTHLYTLIVRPDNTYEVKIDNSQVESGSLEDDWDFLPPKKIKDPDASK |
| | | PEDWDERAKIDDPTDSKPEDWDKPEHIPDPDAKKPEDWDEEMDGEWEP |
| | | PVIQNPEYKGEWKPRQIDNPDYKGTWIHPEIDNPEYSPDPSIYAYDNFGV |
| | | LGLDLWQVKSGTIFDNFLITNDEAYAEEFGNETWGVTKAAEKQMKDKQ |
| | | DEEQRLKEEEEDKKRKEEEEAEDMCRRMMRTKMRMRRMRRTRRKMRR |
| | | KMSPARPRTSCREACLQGWTEA |
| SEQ | Type | EPAVYFKEQFLDGDGWTSRWIESKHKSDFGKFVLSSGKFYGDEEKDKGL |
| ID NO: | 11 | QTSQDARFYALSASFEPFSNKGQTLVVQFTVKHEQNIDCGGGYVKLFPNS |
| 6323 | | LDQTDMHGDSEYNIMFGPDICGPGTKKVHVIFNYKGKNVLINKDIRCKD |
| | | DEFTHLYTLIVRPDNTYEVKIDNSQVESGSLEDDWDFLPPKKIKDPDASK |
| | | PEDWDERAKIDDPTDSKPEDWDKPEHIPDPDAKKPEDWDEEMDGEWEP |
| | | PVIQNPEYKGEWKPRQIDNPDYKGTWIHPEIDNPEYSPDPSIYAYDNFGV |
| | | LGLDLWQVKSGTIFDNFLITNDEAYAEEFGNETWGVTKAAEKQMKDKQ |
| | | DEDQRQRTRRMMRTKMRMRRMRRTRRKMRRKMSPARPRTSCREACLQ |
| | | GWTEA |
| SEQ | Type | EPAVYFKEQFLDGDGWTSRWIESKHKSDFGKFVLSSGKFYGDEEKDKGL |
| ID NO: | 12 | QTSQDARFYALSASFEPFSNKGQTLVVQFTVKHEQNIDCGGGYVKLFPNS |
| 6324 | | LDQTDMHGDSEYNIMFGPDICGPGTKKVHVIFNYKGKNVLINKDIRCKD |
| | | DEFTHLYTLIVRPDNTYEVKIDNSQVESGSLEDDWDFLPPKKIKDPDASK |
| | | PEDWDERAKIDDPTDSKPEDWDKPEHIPDPDAKKPEDWDEEMDGEWEP |
| | | PVIQNPEYKGEWKPRQIDNPDYKGTWIHPEIDNPEYSPDPSIYAYDNFGV |
| | | LGLDLWQVKSGTIFDNFLITNDEAYAEEFGNETWGVTKAAEKQMKDKQ |
| | | DEEQRRRRRQRTRRMMRTKMRMRRMRRTRRKMRRKMSPARPRTSCRE |
| | | ACLQGWTEA |
| SEQ | Type | EPAVYFKEQFLDGDGWTSRWIESKHKSDFGKFVLSSGKFYGDEEKDKGL |
| ID NO: | 13 | QTSQDARFYALSASFEPFSNKGQTLVVQFTVKHEQNIDCGGGYVKLFPNS |
| 6325 | | LDQTDMHGDSEYNIMFGPDICGPGTKKVHVIFNYKGKNVLINKDIRCKD |
| | | DEFTHLYTLIVRPDNTYEVKIDNSQVESGSLEDDWDFLPPKKIKDPDASK |
| | | PEDWDERAKIDDPTDSKPEDWDKPEHIPDPDAKKPEDWDEEMDGEWEP |
| | | PVIQNPEYKGEWKPRQIDNPDYKGTWIHPEIDNPEYSPDPSIYAYDNFGV |
| | | LGLDLWQVKSGTIFDNFLITNDEAYAEEFGNETWGVTKAAEKQMKDKQ |
| | | DEEQRQRRRQRTRRMMRTKMRMRRMRRTRRKMRRKMSPARPRTSCRE |
| | | ACLQGWTEA |
| SEQ | Type | EPAVYFKEQFLDGDGWTSRWIESKHKSDFGKFVLSSGKFYGDEEKDKGL |
| ID NO: | 14 | QTSQDARFYALSASFEPFSNKGQTLVVQFTVKHEQNIDCGGGYVKLFPNS |
| 6316 | | LDQTDMHGDSEYNIMFGPDICGPGTKKVHVIFNYKGKNVLINKDIRCKD |
| | | DEFTHLYTLIVRPDNTYEVKIDNSQVESGSLEDDWDFLPPKKIKDPDASK |
| | | PEDWDERAKIDDPTDSKPEDWDKPEHIPDPDAKKPEDWDEEMDGEWEP |
| | | PVIQNPEYKGEWKPRQIDNPDYKGTWIHPEIDNPEYSPDPSIYAYDNFGV |
| | | LGLDLWQVKSGTIFDNFLITNDEAYAEEFGNETWGVTKAAEKQMKDKQ |
| | | DEEQRLRRRQRTRRMMRTKMRMRRMRRTRRKMRRKMSPARPRTSCRE |
| | | ACLQGWTEA |
| SEQ | Type | EPAVYFKEQFLDGDGWTSRWIESKHKSDFGKFVLSSGKFYGDEEKDKGL |
| ID NO: | 15 | QTSQDARFYALSASFEPFSNKGQTLVVQFTVKHEQNIDCGGGYVKLFPNS |
| 6326 | | LDQTDMHGDSEYNIMFGPDICGPGTKKVHVIFNYKGKNVLINKDIRCKD |
| | | DEFTHLYTLIVRPDNTYEVKIDNSQVESGSLEDDWDFLPPKKIKDPDASK |
| | | PEDWDERAKIDDPTDSKPEDWDKPEHIPDPDAKKPEDWDEEMDGEWEP |
| | | PVIQNPEYKGEWKPRQIDNPDYKGTWIHPEIDNPEYSPDPSIYAYDNFGV |
| | | LGLDLWQVKSGTIFDNFLITNDEAYAEEFGNETWGVTKAAEKQMKDKQ |
| | | DEEQRLRRRERTRRMMRTKMRMRRMRRTRRKMRRKMSPARPRTSCRE |
| | | ACLQGWTEA |
| SEQ | Type | EPAVYFKEQFLDGDGWTSRWIESKHKSDFGKFVLSSGKFYGDEEKDKGL |
| ID NO: | 16 | QTSQDARFYALSASFEPFSNKGQTLVVQFTVKHEQNIDCGGGYVKLFPNS |
| 6327 | | LDQTDMHGDSEYNIMFGPDICGPGTKKVHVIFNYKGKNVLINKDIRCKD |
| | | DEFTHLYTLIVRPDNTYEVKIDNSQVESGSLEDDWDFLPPKKIKDPDASK |
| | | PEDWDERAKIDDPTDSKPEDWDKPEHIPDPDAKKPEDWDEEMDGEWEP |
| | | PVIQNPEYKGEWKPRQIDNPDYKGTWIHPEIDNPEYSPDPSIYAYDNFGV |
| | | LGLDLWQVKSGTIFDNFLITNDEAYAEEFGNETWGVTKAAEKQMKDKQ |
| | | DEEQRLQRRQRTRRMMRTKMRMRRMRRTRRKMRRKMSPARPRTSCRE |
| | | ACLQGWTEA |
| SEQ | Type | EPAVYFKEQFLDGDGWTSRWIESKHKSDFGKFVLSSGKFYGDEEKDKGL |
| ID NO: | 17 | QTSQDARFYALSASFEPFSNKGQTLVVQFTVKHEQNIDCGGGYVKLFPNS |
| 6328 | | LDQTDMHGDSEYNIMFGPDICGPGTKKVHVIFNYKGKNVLINKDIRCKD |
| | | DEFTHLYTLIVRPDNTYEVKIDNSQVESGSLEDDWDFLPPKKIKDPDASK |
| | | PEDWDERAKIDDPTDSKPEDWDKPEHIPDPDAKKPEDWDEEMDGEWEP |
| | | PVIQNPEYKGEWKPRQIDNPDYKGTWIHPEIDNPEYSPDPSIYAYDNFGV |
| | | LGLDLWQVKSGTIFDNFLITNDEAYAEEFGNETWGVTKAAEKQMKDKQ |
| | | DEEQRLKRRQWTRRMMRTKMRMRRMRRTRRKMRRKMSPARPRTSCRE |
| | | ACLQGWTEA |
| SEQ | Type | EPAVYFKEQFLDGDGWTSRWIESKHKSDFGKFVLSSGKFYGDEEKDKGL |
| ID NO: | 18 | QTSQDARFYALSASFEPFSNKGQTLVVQFTVKHEQNIDCGGGYVKLFPNS |
| 6329 | | LDQTDMHGDSEYNIMFGPDICGPGTKKVHVIFNYKGKNVLINKDIRCKD |
| | | DEFTHLYTLIVRPDNTYEVKIDNSQVESGSLEDDWDFLPPKKIKDPDASK |
| | | PEDWDERAKIDDPTDSKPEDWDKPEHIPDPDAKKPEDWDEEMDGEWEP |
| | | PVIQNPEYKGEWKPRQIDNPDYKGTWIHPEIDNPEYSPDPSIYAYDNFGV |
| | | LGLDLWQVKSGTIFDNFLITNDEAYAEEFGNETWGVTKAAEKQMKDKQ |
| | | DEEQRLKRMMRTKMRMRRMRRTRRKMRRKMSPARPRTSCREACLQG |
| | | WTEA |
| SEQ | Type | EPAVYFKEQFLDGDGWTSRWIESKHKSDFGKFVLSSGKFYGDEEKDKGL |
| ID NO: | 19 | QTSQDARFYALSASFEPFSNKGQTLVVQFTVKHEQNIDCGGGYVKLFPNS |
| 6330 | | LDQTDMHGDSEYNIMFGPDICGPGTKKVHVIFNYKGKNVLINKDIRCKD |
| | | DEFTHLYTLIVRPDNTYEVKIDNSQVESGSLEDDWDFLPPKKIKDPDASK |
| | | PEDWDERAKIDDPTDSKPEDWDKPEHIPDPDAKKPEDWDEEMDGEWEP |
| | | PVIQNPEYKGEWKPRQIDNPDYKGTWIHPEIDNPEYSPDPSIYAYDNFGV |
| | | LGLDLWQVKSGTIFDNFLITNDEAYAEEFGNETWGVTKAAEKQMKDKQ |
| | | DEEQRLKEERQRTRRMMRTKMRMRRMRRTRRKMRRKMSPARPRTSCR |
| | | EACLQGWTEA |
| SEQ | Type | EPAVYFKEQFLDGDGWTSRWIESKHKSDFGKFVLSSGKFYGDEEKDKGL |
| ID NO: | 20 | QTSQDARFYALSASFEPFSNKGQTLVVQFTVKHEQNIDCGGGYVKLFPNS |
| 6331 | | LDQTDMHGDSEYNIMFGPDICGPGTKKVHVIFNYKGKNVLINKDIRCKD |
| | | DEFTHLYTLIVRPDNTYEVKIDNSQVESGSLEDDWDFLPPKKIKDPDASK |
| | | PEDWDERAKIDDPTDSKPEDWDKPEHIPDPDAKKPEDWDEEMDGEWEP |
| | | PVIQNPEYKGEWKPRQIDNPDYKGTWIHPEIDNPEYSPDPSIYAYDNFGV |
| | | LGLDLWQVKSGTIFDNFLITNDEAYAEEFGNETWGVTKAAEKQMKDKQ |
| | | DEEQRLKEEEEGRRQRTRRMMRTKMRMRRMRRTRRKMRRKMSPARPR |
| | | TSCREACLQGWTEA |
| SEQ | Type | EPAVYFKEQFLDGDGWTSRWIESKHKSDFGKFVLSSGKFYGDEEKDKGL |
| ID NO: | 21 | QTSQDARFYALSASFEPFSNKGQTLVVQFTVKHEQNIDCGGGYVKLFPNS |
| 6332 | | LDQTDMHGDSEYNIMFGPDICGPGTKKVHVIFNYKGKNVLINKDIRCKD |
| | | DEFTHLYTLIVRPDNTYEVKIDNSQVESGSLEDDWDFLPPKKIKDPDASK |
| | | PEDWDERAKIDDPTDSKPEDWDKPEHIPDPDAKKPEDWDEEMDGEWEP |
| | | PVIQNPEYKGEWKPRQIDNPDYKGTWIHPEIDNPEYSPDPSIYAYDNFGV |
| | | LGLDLWQVKSGTIFDNFLITNDEAYAEEFGNETWGVTKAAEKQMKDKQ |
| | | DEEQRLKEEEEAFKRTRRMMRTKMRMRRMRRTRRKMRRKMSPARPRT |
| | | SCREACLQGWTEA |
| SEQ | Type | EPAVYFKEQFLDGDGWTSRWIESKHKSDFGKFVLSSGKFYGDEEKDKGL |
| ID NO: | 22 | QTSQDARFYALSASFEPFSNKGQTLVVQFTVKHEQNIDCGGGYVKLFPNS |
| 6333 | | LDQTDMHGDSEYNIMFGPDICGPGTKKVHVIFNYKGKNVLINKDIRCKD |
| | | DEFTHLYTLIVRPDNTYEVKIDNSQVESGSLEDDWDFLPPKKIKDPDASK |
| | | PEDWDERAKIDDPTDSKPEDWDKPEHIPDPDAKKPEDWDEEMDGEWEP |
| | | PVIQNPEYKGEWKPRQIDNPDYKGTWIHPEIDNPEYSPDPSIYAYDNFGV |
| | | LGLDLWQVKSGTIFDNFLITNDEAYAEEFGNETWGVTKAAEKQMKDKQ |
| | | DEEQRLKEEEEDNAKRRRRQRTRRMMRTKMRMRRMRRTRRKMRRKM |
| | | SPARPRTSCREACLQGWTEA |
| SEQ | Type | EPAVYFKEQFLDGDGWTSRWIESKHKSDFGKFVLSSGKFYGDEEKDKGL |
| ID NO: | 23 | QTSQDARFYALSASFEPFSNKGQTLVVQFTVKHEQNIDCGGGYVKLFPNS |
| 6334 | | LDQTDMHGDSEYNIMFGPDICGPGTKKVHVIFNYKGKNVLINKDIRCKD |
| | | DEFTHLYTLIVRPDNTYEVKIDNSQVESGSLEDDWDFLPPKKIKDPDASK |
| | | PEDWDERAKIDDPTDSKPEDWDKPEHIPDPDAKKPEDWDEEMDGEWEP |
| | | PVIQNPEYKGEWKPRQIDNPDYKGTWIHPEIDNPEYSPDPSIYAYDNFGV |
| | | LGLDLWQVKSGTIFDNFLITNDEAYAEEFGNETWGVTKAAEKQMKDKQ |
| | | DEEQRLKEEEEDCVRRRRQRTRRMMRTKMRMRRMRRTRRKMRRKMSP |
| | | ARPRTSCREACLQGWTEA |
| SEQ | Type | EPAVYFKEQFLDGDGWTSRWIESKHKSDFGKFVLSSGKFYGDEEKDKGL |
| ID NO: | 24 | QTSQDARFYALSASFEPFSNKGQTLVVQFTVKHEQNIDCGGGYVKLFPNS |
| 6335 | | LDQTDMHGDSEYNIMFGPDICGPGTKKVHVIFNYKGKNVLINKDIRCKD |
| | | DEFTHLYTLIVRPDNTYEVKIDNSQVESGSLEDDWDFLPPKKIKDPDASK |
| | | PEDWDERAKIDDPTDSKPEDWDKPEHIPDPDAKKPEDWDEEMDGEWEP |
| | | PVIQNPEYKGEWKPRQIDNPDYKGTWIHPEIDNPEYSPDPSIYAYDNFGV |
| | | LGLDLWQVKSGTIFDNFLITNDEAYAEEFGNETWGVTKAAEKQMKDKQ |
| | | DEEQRLKEEEEDRRQRTRRMMRTKMRMRRMRRTRRKMRRKMSPARPR |
| | | TSCREACLQGWTEA |
| SEQ | Type | EPAVYFKEQFLDGDGWTSRWIESKHKSDFGKFVLSSGKFYGDEEKDKGL |
| ID NO: | 25 | QTSQDARFYALSASFEPFSNKGQTLVVQFTVKHEQNIDCGGGYVKLFPNS |
| 6336 | | LDQTDMHGDSEYNIMFGPDICGPGTKKVHVIFNYKGKNVLINKDIRCKD |
| | | DEFTHLYTLIVRPDNTYEVKIDNSQVESGSLEDDWDFLPPKKIKDPDASK |
| | | PEDWDERAKIDDPTDSKPEDWDKPEHIPDPDAKKPEDWDEEMDGEWEP |
| | | PVIQNPEYKGEWKPRQIDNPDYKGTWIHPEIDNPEYSPDPSIYAYDNFGV |
| | | LGLDLWQVKSGTIFDNFLITNDEAYAEEFGNETWGVTKAAEKQMKDKQ |
| | | DEEQRLKEEEEDKRQRTRRMMRTKMRMRRMRRTRRKMRRKMSPARPR |
| | | TSCREACLQGWTEA |
| SEQ | Type | EPAVYFKEQFLDGDGWTSRWIESKHKSDFGKFVLSSGKFYGDEEKDKGL |
| ID NO: | 26 | QTSQDARFYALSASFEPFSNKGQTLVVQFTVKHEQNIDCGGGYVKLFPNS |
| 6337 | | LDQTDMHGDSEYNIMFGPDICGPGTKKVHVIFNYKGKNVLINKDIRCKD |
| | | DEFTHLYTLIVRPDNTYEVKIDNSQVESGSLEDDWDFLPPKKIKDPDASK |
| | | PEDWDERAKIDDPTDSKPEDWDKPEHIPDPDAKKPEDWDEEMDGEWEP |
| | | PVIQNPEYKGEWKPRQIDNPDYKGTWIHPEIDNPEYSPDPSIYAYDNFGV |
| | | LGLDLWQVKSGTIFDNFLITNDEAYAEEFGNETWGVTKAAEKQMKDKQ |
| | | DEEQRLKEEEEDKNAKRRRRQRTRRMMRTKMRMRRMRRTRRKMRRK |
| | | MSPARPRTSCREACLQGWTEA |
| SEQ | Type | EPAVYFKEQFLDGDGWTSRWIESKHKSDFGKFVLSSGKFYGDEEKDKGL |
| ID NO: | 27 | QTSQDARFYALSASFEPFSNKGQTLVVQFTVKHEQNIDCGGGYVKLFPNS |
| 6338 | | LDQTDMHGDSEYNIMFGPDICGPGTKKVHVIFNYKGKNVLINKDIRCKD |
| | | DEFTHLYTLIVRPDNTYEVKIDNSQVESGSLEDDWDFLPPKKIKDPDASK |
| | | PEDWDERAKIDDPTDSKPEDWDKPEHIPDPDAKKPEDWDEEMDGEWEP |
| | | PVIQNPEYKGEWKPRQIDNPDYKGTWIHPEIDNPEYSPDPSIYAYDNFGV |
| | | LGLDLWQVKSGTIFDNFLITNDEAYAEEFGNETWGVTKAAEKQMKDKQ |
| | | DEEQRLKEEEEDKCFAKRRRRQRTRRMMRTKMRMRRMRRTRRKMRRK |
| | | MSPARPRTSCREACLQGWTEA |
| SEQ | Type | EPAVYFKEQFLDGDGWTSRWIESKHKSDFGKFVLSSGKFYGDEEKDKGL |
| ID NO: | 28 | QTSQDARFYALSASFEPFSNKGQTLVVQFTVKHEQNIDCGGGYVKLFPNS |
| 6339 | | LDQTDMHGDSEYNIMFGPDICGPGTKKVHVIFNYKGKNVLINKDIRCKD |
| | | DEFTHLYTLIVRPDNTYEVKIDNSQVESGSLEDDWDFLPPKKIKDPDASK |
| | | PEDWDERAKIDDPTDSKPEDWDKPEHIPDPDAKKPEDWDEEMDGEWEP |
| | | PVIQNPEYKGEWKPRQIDNPDYKGTWIHPEIDNPEYSPDPSIYAYDNFGV |
| | | LGLDLWQVKSGTIFDNFLITNDEAYAEEFGNETWGVTKAAEKQMKDKQ |
| | | DEEQRLKEEEEDKKRKRRMMRTKMRMRRMRRTRRKMRRKMSPARPRT |
| | | SCREACLQGWTEA |
| SEQ | Type | EPAVYFKEQFLDGDGWTSRWIESKHKSDFGKFVLSSGKFYGDEEKDKGL |
| ID NO: | 29 | QTSQDARFYALSASFEPFSNKGQTLVVQFTVKHEQNIDCGGGYVKLFPNS |
| 6340 | | LDQTDMHGDSEYNIMFGPDICGPGTKKVHVIFNYKGKNVLINKDIRCKD |
| | | DEFTHLYTLIVRPDNTYEVKIDNSQVESGSLEDDWDFLPPKKIKDPDASK |
| | | PEDWDERAKIDDPTDSKPEDWDKPEHIPDPDAKKPEDWDEEMDGEWEP |
| | | PVIQNPEYKGEWKPRQIDNPDYKGTWIHPEIDNPEYSPDPSIYAYDNFGV |
| | | LGLDLWQVKSGTIFDNFLITNDEAYAEEFGNETWGVTKAAEKQMKDKQ |
| | | DEEQRLKEEEEDKKRKEPPLCLRRMMRTKMRMRRMRRTRRKMRRKMS |
| | | PARPRTSCREACLQGWTEA |
| SEQ | Type | EPAVYFKEQFLDGDGWTSRWIESKHKSDFGKFVLSSGKFYGDEEKDKGL |
| ID NO: | 30 | QTSQDARFYALSASFEPFSNKGQTLVVQFTVKHEQNIDCGGGYVKLFPNS |
| 6341 | | LDQTDMHGDSEYNIMFGPDICGPGTKKVHVIFNYKGKNVLINKDIRCKD |
| | | DEFTHLYTLIVRPDNTYEVKIDNSQVESGSLEDDWDFLPPKKIKDPDASK |
| | | PEDWDERAKIDDPTDSKPEDWDKPEHIPDPDAKKPEDWDEEMDGEWEP |
| | | PVIQNPEYKGEWKPRQIDNPDYKGTWIHPEIDNPEYSPDPSIYAYDNFGV |
| | | LGLDLWQVKSGTIFDNFLITNDEAYAEEFGNETWGVTKAAEKQMKDKQ |
| | | DEEQRLKEEEEDKKRKEDHPCRRMMRTKMRMRRMRRTRRKMRRKMSP |
| | | ARPRTSCREACLQGWTEA |
| SEQ | Type | EPAVYFKEQFLDGDGWTSRWIESKHKSDFGKFVLSSGKFYGDEEKDKGL |
| ID NO: | 31 | QTSQDARFYALSASFEPFSNKGQTLVVQFTVKHEQNIDCGGGYVKLFPNS |
| 6342 | | LDQTDMHGDSEYNIMFGPDICGPGTKKVHVIFNYKGKNVLINKDIRCKD |
| | | DEFTHLYTLIVRPDNTYEVKIDNSQVESGSLEDDWDFLPPKKIKDPDASK |
| | | PEDWDERAKIDDPTDSKPEDWDKPEHIPDPDAKKPEDWDEEMDGEWEP |
| | | PVIQNPEYKGEWKPRQIDNPDYKGTWIHPEIDNPEYSPDPSIYAYDNFGV |
| | | LGLDLWQVKSGTIFDNFLITNDEAYAEEFGNETWGVTKAAEKQMKDKQ |
| | | DEEQRLKEEEEDKKRKEEEEAEGNCRRMMRTKMRMRRMRRTRRKMRR |
| | | KMSPARPRTSCREACLQGWTEA |
| SEQ | Type | EPAVYFKEQFLDGDGWTSRWIESKHKSDFGKFVLSSGKFYGDEEKDKGL |
| ID NO: | 32 | QTSQDARFYALSASFEPFSNKGQTLVVQFTVKHEQNIDCGGGYVKLFPNS |
| 6343 | | LDQTDMHGDSEYNIMFGPDICGPGTKKVHVIFNYKGKNVLINKDIRCKD |
| | | DEFTHLYTLIVRPDNTYEVKIDNSQVESGSLEDDWDFLPPKKIKDPDASK |
| | | PEDWDERAKIDDPTDSKPEDWDKPEHIPDPDAKKPEDWDEEMDGEWEP |
| | | PVIQNPEYKGEWKPRQIDNPDYKGTWIHPEIDNPEYSPDPSIYAYDNFGV |
| | | LGLDLWQVKSGTIFDNFLITNDEAYAEEFGNETWGVTKAAEKQMKDKQ |
| | | DEEQRLKEEEEDKKRKEEEEAEDCRRMMRTKMRMRRMRRTRRKMRRK |
| | | MSPARPRTSCREACLQGWTEA |
| SEQ | Type | EPAVYFKEQFLDGDGWTSRWIESKHKSDFGKFVLSSGKFYGDEEKDKGL |
| ID NO: | 33 | QTSQDARFYALSASFEPFSNKGQTLVVQFTVKHEQNIDCGGGYVKLFPNS |
| 6344 | | LDQTDMHGDSEYNIMFGPDICGPGTKKVHVIFNYKGKNVLINKDIRCKD |
| | | DEFTHLYTLIVRPDNTYEVKIDNSQVESGSLEDDWDFLPPKKIKDPDASK |
| | | PEDWDERAKIDDPTDSKPEDWDKPEHIPDPDAKKPEDWDEEMDGEWEP |
| | | PVIQNPEYKGEWKPRQIDNPDYKGTWIHPEIDNPEYSPDPSIYAYDNFGV |
| | | LGLDLWQVKSGTIFDNFLITNDEAYAEEFGNETWGVTKAAEKQMKDKQ |
| | | DEEQRLKEEEEDKKRKEEEEAEDKCRRMMRTKMRMRRMRRTRRKMRR |
| | | KMSPARPRTSCREACLQGWTEA |
| SEQ | Type | EPAVYFKEQFLDGDGWTSRWIESKHKSDFGKFVLSSGKFYGDEEKDKGL |
| ID NO: | 34 | QTSQDARFYALSASFEPFSNKGQTLVVQFTVKHEQNIDCGGGYVKLFPNS |
| 6345 | | LDQTDMHGDSEYNIMFGPDICGPGTKKVHVIFNYKGKNVLINKDIRCKD |
| | | DEFTHLYTLIVRPDNTYEVKIDNSQVESGSLEDDWDFLPPKKIKDPDASK |
| | | PEDWDERAKIDDPTDSKPEDWDKPEHIPDPDAKKPEDWDEEMDGEWEP |
| | | PVIQNPEYKGEWKPRQIDNPDYKGTWIHPEIDNPEYSPDPSIYAYDNFGV |
| | | LGLDLWQVKSGTIFDNFLITNDEAYAEEFGNETWGVTKAAEKQMKDKQ |
| | | DEEQRLKEEEEDKKRKEEEEAEDTCRRMMRTKMRMRRMRRTRRKMRR |
| | | KMSPARPRTSCREACLQGWTEA |
| SEQ | Type | EPAVYFKEQFLDGDGWTSRWIESKHKSDFGKFVLSSGKFYGDEEKDKGL |
| ID NO: | 35 | QTSQDARFYALSASFEPFSNKGQTLVVQFTVKHEQNIDCGGGYVKLFPNS |
| 6346 | | LDQTDMHGDSEYNIMFGPDICGPGTKKVHVIFNYKGKNVLINKDIRCKD |
| | | DEFTHLYTLIVRPDNTYEVKIDNSQVESGSLEDDWDFLPPKKIKDPDASK |
| | | PEDWDERAKIDDPTDSKPEDWDKPEHIPDPDAKKPEDWDEEMDGEWEP |
| | | PVIQNPEYKGEWKPRQIDNPDYKGTWIHPEIDNPEYSPDPSIYAYDNFGV |
| | | LGLDLWQVKSGTIFDNFLITNDEAYAEEFGNETWGVTKAAEKQMKDKQ |
| | | DEEQRLKEEEEDKKRKEEEEAEDICRRMMRTKMRMRRMRRTRRKMRR |
| | | KMSPARPRTSCREACLQGWTEA |
| SEQ | Type | EPAVYFKEQFLDGDGWTSRWIESKHKSDFGKFVLSSGKFYGDEEKDKGL |
| ID NO: | 36 | QTSQDARFYALSASFEPFSNKGQTLVVQFTVKHEQNIDCGGGYVKLFPNS |
| 6344 | | LDQTDMHGDSEYNIMFGPDICGPGTKKVHVIFNYKGKNVLINKDIRCKD |
| | | DEFTHLYTLIVRPDNTYEVKIDNSQVESGSLEDDWDFLPPKKIKDPDASK |
| | | PEDWDERAKIDDPTDSKPEDWDKPEHIPDPDAKKPEDWDEEMDGEWEP |
| | | PVIQNPEYKGEWKPRQIDNPDYKGTWIHPEIDNPEYSPDPSIYAYDNFGV |
| | | LGLDLWQVKSGTIFDNFLITNDEAYAEEFGNETWGVTKAAEKQMKDKQ |
| | | DEEQRLKEEEEDKKRKEEEEAEDKCRRMMRTKMRMRRMRRTRRKMRR |
| | | KMSPARPRTSCREACLQGWTEA |
| SEQ | mutCal | MLLSVPLLLGLLGLAVAHHHHHHHHGGGGSEPAVYFKEQFLDGDGWTS |
| ID NO: | R ins | RWIESKHKSDFGKFVLSSGKFYGDEEKDKGLQTSQDARFYALSASFEPFS |
| 1002 | | NKGQTLVVQFTVKHEQNIDCGGGYVKLFPNSLDQTDMHGDSEYNIMFG |
| | | PDICGPGTKKVHVIFNYKGKNVLINKDIRCKDDEFTHLYTLIVRPDNTYE |
| | | VKIDNSQVESGSLEDDWDFLPPKKIKDPDASKPEDWDERAKIDDPTDSKP |
| | | EDWDKPEHIPDPDAKKPEDWDEEMDGEWEPPVIQNPEYKGEWKPRQID |
| | | NPDYKGTWIHPEIDNPEYSPDPSIYAYDNFGVLGLDLWQVKSGTIFDNFLI |
| | | TNDEAYAEEFGNETWGVTKAAEKQMKDKQDEEQRLKEEEEDKKRKEE |
| | | EEAEDNCRRMMRTKMRMRRMRRTRRKMRRKMSPARPRTSCREACLQG |
| | | WTEA |
| SEQ | mutCal | MLLSVPLLLGLLGLAVAHHHHHHHHGGGGSEPAVYFKEQFLDGDGWTS |
| ID NO: | R del | RWIESKHKSDFGKFVLSSGKFYGDEEKDKGLQTSQDARFYALSASFEPFS |
| 1003 | | NKGQTLVVQFTVKHEQNIDCGGGYVKLFPNSLDQTDMHGDSEYNIMFG |
| | | PDICGPGTKKVHVIFNYKGKNVLINKDIRCKDDEFTHLYTLIVRPDNTYE |
| | | VKIDNSQVESGSLEDDWDFLPPKKIKDPDASKPEDWDERAKIDDPTDSKP |
| | | EDWDKPEHIPDPDAKKPEDWDEEMDGEWEPPVIQNPEYKGEWKPRQID |
| | | NPDYKGTWIHPEIDNPEYSPDPSIYAYDNFGVLGLDLWQVKSGTIFDNFLI |
| | | TNDEAYAEEFGNETWGVTKAAEKQMKDKQDEEQRTRRMMRTKMRMR |
| | | RMRRTRRKMRRKMSPARPRTSCREACLQGWTEA |

TABLE 3
The C-terminal amino acid sequences of calreticulin mutants

| SEQ ID | | C-terminal sequences of insertion/deletion frameshift mutations of |
|---|---|---|
| NO | Type | calreticulin |
| SEQ ID | Type 1 | TRRMMRTKMRMRRMRRTRRKMRRKMSPARPRTSCREACLQGWTE |
| NO: 6287 | | A |
| SEQ ID | Type 2 | NCRRMMRTKMRMRRMRRTRRKMRRKMSPARPRTSCREACLQGWT |
| NO: 6288 | | EA |
| SEQ ID | Type 3 | QRTRRMMRTKMRMRRMRRTRRKMRRKMSPARPRTSCREACLQGW |
| NO: 6289 | | TEA |
| SEQ ID | Type 4 | RRRQRTRRMMRTKMRMRRMRRTRRKMRRKMSPARPRTSCREACL |
| NO: 6290 | | QGWTEA |
| SEQ ID | Type 5 | GQRTRRMMRTKMRMRRMRRTRRKMRRKMSPARPRTSCREACLQG |
| NO: 6291 | | WTEA |
| SEQ ID | Type 6 | RRQRTRRMMRTKMRMRRMRRTRRKMRRKMSPARPRTSCREACLQ |
| NO: 6292 | | GWTEA |
| SEQ ID | Type 7 | RRMMRTKMRMRRMRRTRRKMRRKMSPARPRTSCREACLQGWTEA |
| NO: 6293 | | |
| SEQ ID | Type 8 | RRQRTRRMMRTKMRMRRMRRTRRKMRRKMSPARPRTSCREACLQ |
| NO: 6292 | | GWTEA |
| SEQ ID | Type 9 | RQRTRRMMRTKMRMRRMRRTRRKMRRKMSPARPRTSCREACLQG |
| NO: 6294 | | WTEA |
| SEQ ID | Type 10 | MCRRMMRTKMRMRRMRRTRRKMRRKMSPARPRTSCREACLQGWT |
| NO: 6295 | | EA |
| SEQ ID | Type 11 | DQRQRTRRMMRTKMRMRRMRRTRRKMRRKMSPARPRTSCREACL |
| NO: 6296 | | QGWTEA |
| SEQ ID | Type 12 | RRRRQRTRRMMRTKMRMRRMRRTRRKMRRKMSPARPRTSCREACL |
| NO: 152 | | QGWTEA |
| SEQ ID | Type 13 | QRRRQRTRRMMRTKMRMRRMRRTRRKMRRKMSPARPRTSCREAC |
| NO: 6297 | | LQGWTEA |
| SEQ ID | Type 14 | RRRQRTRRMMRTKMRMRRMRRTRRKMRRKMSPARPRTSCREACL |
| NO: 6290 | | QGWTEA |
| SEQ ID | Type 15 | RRRERTRRMMRTKMRMRRMRRTRRKMRRKMSPARPRTSCREACLQ |
| NO: 6298 | | GWTEA |
| SEQ ID | Type 16 | QRRQRTRRMMRTKMRMRRMRRTRRKMRRKMSPARPRTSCREACL |
| NO: 6299 | | QGWTEA |
| SEQ ID | Type 17 | RRQWTRRMMRTKMRMRRMRRTRRKMRRKMSPARPRTSCREACLQ |
| NO: 6300 | | GWTEA |
| SEQ ID | Type 18 | RMMRTKMRMRRMRRTRRKMRRKMSPARPRTSCREACLQGWTEA |
| NO: 6301 | | |
| SEQ ID | Type 19 | RQRTRRMMRTKMRMRRMRRTRRKMRRKMSPARPRTSCREACLQG |
| NO: 6294 | | WTEA |
| SEQ ID | Type 20 | GRRQRTRRMMRTKMRMRRMRRTRRKMRRKMSPARPRTSCREACL |
| NO: 6302 | | QGWTEA |
| SEQ ID | Type 21 | AFKRTRRMMRTKMRMRRMRRTRRKMRRKMSPARPRTSCREACLQ |
| NO: 6303 | | GWTEA |
| SEQ ID | Type 22 | NAKRRRRQRTRRMMRTKMRMRRMRRTRRKMRRKMSPARPRTSCR |
| NO: 6304 | | EACLQGWTEA |
| SEQ ID | Type 23 | CVRRRRQRTRRMMRTKMRMRRMRRTRRKMRRKMSPARPRTSCRE |
| NO: 6305 | | ACLQGWTEA |
| SEQ ID | Type 24 | RRQRTRRMMRTKMRMRRMRRTRRKMRRKMSPARPRTSCREACLQ |
| NO: 6292 | | GWTEA |
| SEQ ID | Type 25 | RQRTRRMMRTKMRMRRMRRTRRKMRRKMSPARPRTSCREACLQG |
| NO: 6294 | | WTEA |
| SEQ ID | Type 26 | NAKRRRRQRTRRMMRTKMRMRRMRRTRRKMRRKMSPARPRTSCR |
| NO: 6304 | | EACLQGWTEA |
| SEQ ID | Type 27 | CFAKRRRRQRTRRMMRTKMRMRRMRRTRRKMRRKMSPARPRTSC |
| NO: 6306 | | REACLQGWTEA |
| SEQ ID | Type 28 | RRMMRTKMRMRRMRRTRRKMRRKMSPARPRTSCREACLQGWTEA |
| NO: 6293 | | |
| SEQ ID | Type 29 | PPLCLRRMMRTKMRMRRMRRTRRKMRRKMSPARPRTSCREACLQG |
| NO: 6307 | | WTEA |
| SEQ ID | Type 30 | DHPCRRMMRTKMRMRRMRRTRRKMRRKMSPARPRTSCREACLQG |
| NO: 6308 | | WTEA |
| SEQ ID | Type 31 | GNCRRMMRTKMRMRRMRRTRRKMRRKMSPARPRTSCREACLQGW |
| NO: 6309 | | TEA |
| SEQ ID | Type 32 | CRRMMRTKMRMRRMRRTRRKMRRKMSPARPRTSCREACLQGWTE |
| NO: 6310 | | A |
| SEQ ID | Type 33 | CRRMMRTKMRMRRMRRTRRKMRRKMSPARPRTSCREACLQGWTE |
| NO: 6310 | | A |
| SEQ ID | Type 34 | TCRRMMRTKMRMRRMRRTRRKMRRKMSPARPRTSCREACLQGWT |
| NO: 6311 | | EA |
| SEQ ID | Type 35 | ICRRMMRTKMRMRRMRRTRRKMRRKMSPARPRTSCREACLQGWTE |
| NO: 6312 | | A |
| SEQ ID | Type 36 | CRRMMRTKMRMRRMRRTRRKMRRKMSPARPRTSCREACLQGWTE |
| NO: 6310 | | A |

[0329] In some embodiments, the calreticulin-targeting antigen binding domain comprises any CDR amino acid sequence, framework region (FWR) amino acid sequence, or variable region amino acid sequence disclosed in Tables 4-7, Table 24, and Table 25.

[0330] In some embodiments, the calreticulin-targeting antigen binding domain comprises a VH comprising one, two, three CDRs from murine 16B11.1 antibody, e.g., as described in Table 4. For example, in some embodiments, the calreticulin-targeting antigen binding domain comprises a VH comprising a heavy chain complementarity determining region 1 (VHCDR1) amino acid sequence of SEQ ID NO: 6358 (or a sequence with no more than 1, 2, 3, or 4 mutations, e.g., substitutions, additions, or deletions), a VHCDR2 amino acid sequence of SEQ ID NO: 6360 (or a sequence with no more than 1, 2, 3, or 4 mutations, e.g., substitutions, additions, or deletions), and/or a VHCDR3 amino acid sequence of SEQ ID NO: 227 (or a sequence with no more than 1, 2, 3, or 4 mutations, e.g., substitutions, additions, or deletions). In some embodiments, the calreticulin-targeting antigen binding domain comprises a VH comprising a heavy chain complementarity determining region 1 (VHCDR1) amino acid sequence of SEQ ID NO: 6358 (or a sequence with no more than 1, 2, 3, or 4 mutations, e.g., substitutions, additions, or deletions), a VHCDR2 amino acid sequence of SEQ ID NO: 6360 (or a sequence with no more than 1, 2, 3, or 4 mutations, e.g., substitutions, additions, or deletions), and/or a VHCDR3 amino acid sequence of SEQ ID NO: 227 (or a sequence with no more than 1, 2, 3, or 4 mutations, e.g., substitutions, additions, or deletions). In some embodiments, the calreticulin-targeting antigen binding domain comprises a VH comprising a heavy chain complementarity determining region 1 (VHCDR1) amino acid sequence of SEQ ID NO: 6358 (or a sequence with no more than 1, 2, 3, or 4 mutations, e.g., substitutions, additions, or deletions), a VHCDR2 amino acid sequence of SEQ ID NO: 6360 (or a sequence with no more than 1, 2, 3, or 4 mutations, e.g., substitutions, additions, or deletions), and/or a VHCDR3 amino acid sequence of SEQ ID NO: 227 (or a sequence with no more than 1, 2, 3, or 4 mutations, e.g., substitutions, additions, or deletions). In some embodiments, the calreticulin-targeting antigen binding domain comprises a VH comprising a heavy chain complementarity determining region 1 (VHCDR1) amino acid sequence of SEQ ID NO: 6358 (or a sequence with no more than 1, 2, 3, or 4 mutations, e.g., substitutions, additions, or deletions), a VHCDR2 amino acid sequence of SEQ ID NO: 6360 (or a sequence with no more than 1, 2, 3, or 4 mutations, e.g., substitutions, additions, or deletions), and/or a VHCDR3 amino acid sequence of SEQ ID NO: 227 (or a sequence with no more than 1, 2, 3, or 4 mutations, e.g., substitutions, additions, or deletions).

[0331] Alternatively, or in combination with the calreticulin-targeting antigen binding domain comprising the VH comprising one, two, three CDRs from murine 16B11.1 antibody, the calreticulin-targeting antigen binding domain comprises a VL comprising one, two or three CDRs derived from murine 16B11.1 antibody, e.g., as described in Table 4. For example, in some embodiments, the calreticulin-targeting antigen binding domain comprises a VL comprising a light chain complementarity determining region 1 (VLCDR1) amino acid sequence of SEQ ID NO: 251 (or a sequence with no more than 1, 2, 3, or 4 mutations, e.g., substitutions, additions, or deletions), a VLCDR2 amino acid sequence of SEQ ID NO: 246 (or a sequence with no more than 1, 2, 3, or 4 mutations, e.g., substitutions, additions, or deletions), and/or a VLCDR3 amino acid sequence of SEQ ID NO: 248 (or a sequence with no more than 1, 2, 3, or 4 mutations, e.g., substitutions, additions, or deletions). In some embodiments, the calreticulin-targeting antigen binding domain comprises a VL comprising a VLCDR1 amino acid sequence of SEQ ID NO: 251, a VLCDR2 amino acid sequence of SEQ ID NO: 253, and a VLCDR3 amino acid sequence of SEQ ID NO: 255. In some embodiments, the calreticulin-targeting antigen binding domain comprises a VL comprising a VLCDR1 amino acid sequence of SEQ ID NO: 258, a VLCDR2 amino acid sequence of SEQ ID NO: 260, and a VLCDR3 amino acid sequence of SEQ ID NO: 262. In some embodiments, the calreticulin-targeting antigen binding domain comprises a VL comprising a VLCDR1 amino acid sequence of SEQ ID NO: 265, a VLCDR2 amino acid sequence of SEQ ID NO: 267, and a VLCDR3 amino acid sequence of SEQ ID NO: 269. In some embodiments, the calreticulin-targeting antigen binding domain comprises a VL comprising a VLCDR1 amino acid sequence of SEQ ID NO: 272, a VLCDR2 amino acid sequence of SEQ ID NO: 274, and a VLCDR3 amino acid sequence of SEQ ID NO: 276. In some embodiments, the calreticulin-targeting antigen binding domain comprises a VL comprising a VLCDR1 amino acid sequence of SEQ ID NO: 279, a VLCDR2 amino acid sequence of SEQ ID NO: 281, and a VLCDR3 amino acid sequence of SEQ ID NO: 283.

[0332] In some embodiments, the calreticulin-targeting antigen binding domain comprises a VH comprising a heavy chain complementarity determining region 1 (VHCDR1) amino acid sequence of SEQ ID NO: 6253 (or a sequence with no more than 1, 2, 3, or 4 mutations, e.g., substitutions, additions, or deletions), a VHCDR2 amino acid sequence of SEQ ID NO: 6254 (or a sequence with no more than 1, 2, 3, or 4 mutations, e.g., substitutions, additions, or deletions), and/or a VHCDR3 amino acid sequence of SEQ ID NO: 6255 (or a sequence with no more than 1, 2, 3, or 4 mutations, e.g., substitutions, additions, or deletions). In some embodiments, the calreticulin-targeting antigen binding domain comprises a VH comprising a VHCDR1 amino acid sequence of SEQ ID NO: 6253, a VHCDR2 amino acid sequence of SEQ ID NO: 6254, and/or a VHCDR3 amino acid sequence of SEQ ID NO: 6255.

[0333] In some embodiments, the calreticulin-targeting antigen binding domain comprises a VL comprising a light chain complementarity determining region 1 (VLCDR1) amino acid sequence of SEQ ID NO: 6259 (or a sequence with no more than 1, 2, 3, or 4 mutations, e.g., substitutions, additions, or deletions), a VLCDR2 amino acid sequence of SEQ ID NO: 6260 (or a sequence with no more than 1, 2, 3, or 4 mutations, e.g., substitutions, additions, or deletions), and/or a VLCDR3 amino acid sequence of SEQ ID NO: 6261 (or a sequence with no more than 1, 2, 3, or 4 mutations, e.g., substitutions, additions, or deletions). In some embodiments, the calreticulin-targeting antigen binding domain comprises a VL comprising a VLCDR1 amino acid sequence of SEQ ID NO: 6259, a VLCDR2 amino acid sequence of SEQ ID NO: 6260, and a VLCDR3 amino acid sequence of SEQ ID NO: 6261.

[0334] In some embodiments, the calreticulin-targeting antigen binding domain comprises a VH comprising one, two, three, or four framework regions from humanized 16B11.1 antibody, e.g., as described in Table 4. For example, in some embodiments, the calreticulin-targeting antigen binding domain comprises a VH comprising a heavy chain framework region 1 (VHFWR1) amino acid sequence of SEQ ID NO: 6357, a VHFWR2 amino acid sequence of SEQ ID NO: 6359, a VHFWR3 amino acid sequence of SEQ ID NO: 6361, and/or a VHFWR4 amino acid sequence of SEQ ID NO: 6273. In some embodiments, the calreticulin-targeting antigen binding domain comprises a VH comprising a heavy chain framework region 1 (VHFWR1) amino acid sequence of SEQ ID NO: 6362, a VHFWR2 amino acid sequence of SEQ ID NO: 6363, a VHFWR3 amino acid sequence of SEQ ID NO: 226, and/or a VHFWR4 amino acid sequence of SEQ ID NO: 228. In some embodiments, the calreticulin-targeting antigen binding domain comprises a VH comprising a heavy chain framework region 1 (VHFWR1) amino acid sequence of SEQ ID NO: 229, a VHFWR2 amino acid sequence of SEQ ID NO: 6369, a VHFWR3 amino acid sequence of SEQ ID NO: 6371, and/or a VHFWR4 amino acid sequence of SEQ ID NO: 228. In some embodiments, the calreticulin-targeting antigen binding domain comprises a VH comprising a heavy chain framework region 1 (VHFWR1) amino acid sequence of SEQ ID NO: 6373, a VHFWR2 amino acid sequence of SEQ ID NO: 6369, a VHFWR3 amino acid sequence of SEQ ID NO: 6371, and/or a VHFWR4 amino acid sequence of SEQ ID NO: 228.

[0335] In some embodiments, the calreticulin-targeting antigen binding domain comprises a VL comprising a light chain framework region 1 (VLFWR1) amino acid sequence of SEQ ID NO: 6374, a VLFWR2 amino acid sequence of SEQ ID NO: 6375, a VLFWR3 amino acid sequence of SEQ ID NO: 247, and/or a VLFWR4 amino acid sequence of SEQ ID NO: 249. In some embodiments, the calreticulin-targeting antigen binding domain comprises a VL comprising a light chain framework region 1 (VLFWR1) amino acid sequence of SEQ ID NO: 250, a VLFWR2 amino acid sequence of SEQ ID NO: 252, a VLFWR3 amino acid sequence of SEQ ID NO: 254, and/or a VLFWR4 amino acid sequence of SEQ ID NO: 256. In some embodiments, the calreticulin-targeting antigen binding domain comprises a VL comprising a light chain framework region 1 (VLFWR1) amino acid sequence of SEQ ID NO: 257, a VLFWR2 amino acid sequence of SEQ ID NO: 259, a VLFWR3 amino acid sequence of SEQ ID NO: 261, and/or a VLFWR4 amino acid sequence of SEQ ID NO: 263. In some embodiments, the calreticulin-targeting antigen binding domain comprises a VL comprising a light chain framework region 1 (VLFWR1) amino acid sequence of SEQ ID NO: 264, a VLFWR2 amino acid sequence of SEQ ID NO: 266, a VLFWR3 amino acid sequence of SEQ ID NO: 268, and/or a VLFWR4 amino acid sequence of SEQ ID NO: 270. In some embodiments, the calreticulin-targeting antigen binding domain comprises a VL comprising a light chain framework region 1 (VLFWR1) amino acid sequence of SEQ ID NO: 271, a VLFWR2 amino acid sequence of SEQ ID NO: 273, a VLFWR3 amino acid sequence of SEQ ID NO: 275, and/or a VLFWR4 amino acid sequence of SEQ ID NO: 277. In some embodiments, the calreticulin-targeting antigen binding domain comprises a VL comprising a light chain framework region 1 (VLFWR1) amino acid sequence of SEQ ID NO: 278, a VLFWR2 amino acid sequence of SEQ ID NO: 280, a VLFWR3 amino acid sequence of SEQ ID NO: 282, and/or a VLFWR4 amino acid sequence of SEQ ID NO: 284.

[0336] In some embodiments, the calreticulin-targeting antigen binding domain comprises a VH comprising a heavy chain framework region 1 (VHFWR1) amino acid sequence of SEQ ID NO: 6224, a VHFWR2 amino acid sequence of SEQ ID NO: 6226, a VHFWR3 amino acid sequence of SEQ ID NO: 6228, and/or a VHFWR4 amino acid sequence of SEQ ID NO: 6230. In some embodiments, the calreticulin-targeting antigen binding domain comprises a VL comprising a light chain framework region 1 (VLFWR1) amino acid sequence of SEQ ID NO: 6238, a VLFWR2 amino acid sequence of SEQ ID NO: 6240, a VLFWR3 amino acid sequence of SEQ ID NO: 6242, and/or a VLFWR4 amino acid sequence of SEQ ID NO: 6244. In some embodiments, the calreticulin-targeting antigen binding domain comprises a VH comprising a VHFWR1 amino acid sequence of SEQ ID NO: 6263 (or a sequence with no more than 1, 2, 3, 4, 5, or 6 mutations, e.g., substitutions, additions, or deletions), a VHFWR2 amino acid sequence of SEQ ID NO: 6264 (or a sequence with no more than 1, 2, 3, 4, 5, or 6 mutations, e.g., substitutions, additions, or deletions), a VHFWR3 amino acid sequence of SEQ ID NO: 6265 (or a sequence with no more than 1, 2, 3, 4, 5, 6, 7, 8, 9, 10, or 11 mutations, e.g., substitutions, additions, or deletions), and/or a VHFWR4 amino acid sequence of SEQ ID NO: 228. In some embodiments, the calreticulin-targeting antigen binding domain comprises a VL comprising a VLFWR1 amino acid sequence of SEQ ID NO: 6277 (or a sequence with no more than 1, 2, or 3 mutations, e.g., substitutions, additions, or deletions), a VLFWR2 amino acid sequence of SEQ ID NO: 6278 (or a sequence with no more than 1 mutation, e.g., substitution, addition, or deletion), a VLFWR3 amino acid sequence of SEQ ID NO: 6279 (or a sequence with no more than 1 mutation, e.g., substitution, addition, or deletion), and/or a VLFWR4 amino acid sequence of SEQ ID NO: 6280. In some embodiments, the calreticulin-targeting antigen binding domain comprises a VH comprising a VHFWR1 amino acid sequence of SEQ ID NO: 6263, a VHFWR2 amino acid sequence of SEQ ID NO: 6264, a VHFWR3 amino acid sequence of SEQ ID NO: 6265, and/or a VHFWR4 amino acid sequence of SEQ ID NO: 228. In some embodiments, the calreticulin-targeting antigen binding domain comprises a VL comprising a VLFWR1 amino acid sequence of SEQ ID NO: 6277, a VLFWR2 amino acid sequence of SEQ ID NO: 6278, a VLFWR3 amino acid sequence of SEQ ID NO: 6279, and/or a VLFWR4 amino acid sequence of SEQ ID NO: 6280.

[0337] In some embodiments, the calreticulin-targeting antigen binding domain comprises a VH comprising the amino acid sequence of SEQ ID NO: 6347 (or an amino acid sequence having at least about 77%, 80%, 85%, 90%, 95%, or 99% sequence identity to SEQ ID NO: 6347). In some embodiments, the calreticulin-targeting antigen binding domain comprises a VL comprising the amino acid sequence of SEQ ID NO: 6348 (or an amino acid sequence having at least about 77%, 80%, 85%, 90%, 95%, or 99% sequence identity to SEQ ID NO: 6348). In some embodiments, the calreticulin-targeting antigen binding domain comprises a VH comprising the amino acid sequence of SEQ ID NO: 6349 (or an amino acid sequence having at least about 77%, 80%, 85%, 90%, 95%, or 99% sequence identity to SEQ ID NO: 6349). In some embodiments, the calreticulin-targeting antigen binding domain comprises a VH comprising the amino acid sequence of SEQ ID NO: 6350 (or an amino acid sequence having at least about 77%, 80%, 85%, 90%, 95%, or 99% sequence identity to SEQ ID NO: 6350). In some embodiments, the calreticulin-targeting antigen binding domain comprises a VH comprising the amino acid sequence of SEQ ID NO: 6351 (or an amino acid sequence having at least about 77%, 80%, 85%, 90%, 95%, or 99% sequence identity to SEQ ID NO: 6351). In some embodiments, the calreticulin-targeting antigen binding domain comprises a VL comprising the amino acid sequence of SEQ ID NO: 6352 (or an amino acid sequence having at least about 93%, 95%, or 99% sequence identity to SEQ ID NO: 6352). In some embodiments, the calreticulin-targeting antigen binding domain comprises a VL comprising the amino acid sequence of SEQ ID NO: 6353 (or an amino acid sequence having at least about 93%, 95%, or 99% sequence identity to SEQ ID NO: 6353). In some embodiments, the calreticulin-targeting antigen binding domain comprises a VL comprising the amino acid sequence of SEQ ID NO: 6354 (or an amino acid sequence having at least about 93%, 95%, or 99% sequence identity to SEQ ID NO: 6354). In some embodiments, the calreticulin-targeting antigen binding domain comprises a VL comprising the amino acid sequence of SEQ ID NO: 6355 (or an amino acid sequence having at least about 93%, 95%, or 99% sequence identity to SEQ ID NO: 6355). In some embodiments, the calreticulin-targeting antigen binding domain comprises a VL comprising the amino acid sequence of SEQ ID NO: 6356 (or an amino acid sequence having at least about 93%, 95%, or 99% sequence identity to SEQ ID NO: 6356).

[0338] In some embodiments, the calreticulin-targeting antigen binding domain comprises a VH comprising the amino acid sequence of SEQ ID NO: 6247 (or an amino acid sequence having at least about 77%, 80%, 85%, 90%, 95%, or 99% sequence identity to SEQ ID NO: 6247). In some embodiments, the calreticulin-targeting antigen binding domain comprises a VL comprising the amino acid sequence of SEQ ID NO: 6249 (or an amino acid sequence having at least about 93%, 95%, or 99% sequence identity to SEQ ID NO: 6249). In some embodiments, the calreticulin-targeting antigen binding domain comprises a VH comprising the amino acid sequence of SEQ ID NO: 6247. In some embodiments, the calreticulin-targeting antigen binding domain comprises a VL comprising the amino acid sequence of SEQ ID NO: 6249. In some embodiments, the calreticulin-targeting antigen binding domain comprises a VH comprising the amino acid sequence of SEQ ID NO: 6247, and a VL comprising the amino acid sequence of SEQ ID NO: 6249.

[0339] In some embodiments, the calreticulin-targeting antigen binding domain comprises a VH comprising one, two, or all three CDR sequence as listed in a single row of Table 4, or an amino acid sequence having at least 75%, 80%, 85%, 90%, 95%, 96%, 97%, 98%, or 99% sequence identity thereto (e.g., to one, two, or all three of the CDR sequences). In some embodiments, the calreticulin-targeting antigen binding domain comprises a VL comprising one, two, or all three CDR sequence as listed in a single row of Table 5, or an amino acid sequence having at least 75%, 80%, 85%, 90%, 95%, 96%, 97%, 98%, or 99% sequence identity thereto (e.g., to one, two, or all three of the CDR sequences). In some embodiments, the calreticulin-targeting antigen binding domain comprises: (i) a VH comprising one, two, or all three CDR sequence as listed in a single row of Table 4, or an amino acid sequence having at least 75%, 80%, 85%, 90%, 95%, 96%, 97%, 98%, or 99% sequence identity thereto (e.g., to one, two, or all three of the CDR sequences); and (ii) a VL comprising one, two, or all three CDR sequence as listed in a single row of Table 5, or an amino acid sequence having at least 75%, 80%, 85%, 90%, 95%, 96%, 97%, 98%, or 99% sequence identity thereto (e.g., to one, two, or all three of the CDR sequences).

TABLE 4
Exemplary heavy chain CDRs and FWRs of calreticulin-targeting antigen binding domains

| Ab ID | VHFWR1 | VHCDR1 | VHFWR2 | VHCDR2 | VHFWR3 | VHCDR3 | VHFWR4 |
|---|---|---|---|---|---|---|---|
| AbH-1H | QVQLVQ | YSFTG | WVRQAP | YISCYN | RVTMTVDT | SSMDY | WGQG |
| | SGAEVK | YYIH | GQELGW | GASSY | SISTAYTEL | (SEQ | TLVTV |
| | KPGASVK | (SEQ | MG (SEQ | NQKFK | SSLRSEDT | ID NO: | SS (SEQ |
| | VSCKASG | ID NO: | ID NO: | G (SEQ | ATYYCA | 6255) | ID NO: |
| | (SEQ ID | 6253) | 6264) | ID NO: | (SEQ ID NO: | | 228) |
| | NO: 6263) | | | 6254) | 6265) | | |
| AbH-2H | QVTLKES | YSITSD | WIRQPP | YISYSG | RLSITKDTS | DPPYY | WGQG |
| | GPVLVKP | YAWN | GKALEW | STSYNP | KSQVVLTM | YGS | TTVTV |
| | TETLTLT | (SEQ | LA (SEQ | SLKS | TNMDPVDT | (SEQ | SS (SEQ |
| | CTVSG | ID NO: | ID NO: | (SEQ ID | ATYYCAR | ID NO: | ID NO: |
| | (SEQ ID | 6256) | 6267) | NO: | (SEQ ID NO: | 6258) | 6269) |
| | NO: 6266) | | | 6257) | 6268) | | |
| AbM-1H | EVQLEQS | YSFTG | WVKQS | YISCYN | KATFTVDT | SSMDY | WGQG |
| | GPELVKT | YYIH | HGKSLE | GASSY | SSSTAYMQ | (SEQ | TSVTV |
| | GASVKIS | (SEQ | WIG | NQKFK | FNSLTSGD | ID NO: | SS (SEQ |
| | CKASG | ID NO: | (SEQ ID | G (SEQ | SAVYYCA | 6255) | ID NO: |
| | (SEQ ID | 6253) | NO: 6271) | ID NO: | (SEQ ID NO: | | 6273) |
| | NO: 6270) | | | 6254) | 6272) | | |
| AbM-2H | DVQLQES | YSITSD | WIRQFP | YISYSG | RISITRDTS | DPPYY | WGQG |
| | GPGLVK | YAWN | GNKLEW | STSYNP | KNQFFLQL | YGSNG | TSVTV |
| | NSQSLSL | (SEQ | MG (SEQ | SLKS | NSVTPEDT | T (SEQ | SS (SEQ |
| | TCTVTG | ID NO: | ID NO: | (SEQ ID | ATYYCAR | ID NO: | ID NO: |
| | (SEQ ID | 6256) | 6275) | NO: | (SEQ ID NO: | 6262) | 6273) |
| | NO: 6274) | | | 6257) | 6276) | | |
| Murine | EVKLVES | FSRYD | WVRQTP | TISSGG | RFTISRDNA | HSAYY | WGQG |
| anti- | GGGLVK | MS | EKRLEW | SYTYYP | RNTLYLQM | VNYEN | TSVTV |
| calreticulin | PGGSLKL | (SEQ | VA (SEQ | DSVKG | SSLRSEDT | AMDY | SS (SEQ |
| antibody | SCAASGF | ID NO: | ID NO: | (SEQ ID | ALYYCAR | (SEQ | ID NO: |
| 16B11.1 | A | 6358) | 6359) | NO: | (SEQ ID NO: | ID NO: | 6273) |
| heavy chain | (SEQ ID | | | 6360) | 6361) | 227) | |
| variable | NO: 6357) | | | | | | |
| region | | | | | | | |
| Humanized | QVQLVES | FSRYD | WIRQAP | TISSGG | RFTISRDNA | HSAYY | WGQG |
| anti- | GGGLVK | MS | GKGLEW | SYTYYP | KNSLYLQM | VNYEN | TLVTV |
| calreticulin | PGGSLRL | (SEQ | VA (SEQ | DSVKG | NSLRAEDT | AMDY | SS |
| heavy chain | SCAASGF | ID NO: | ID NO: | (SEQ ID | AVYYCAR | (SEQ | (SEQ ID |
| variable | A (SEQ ID | 6358) | 6363) | NO: | (SEQ ID NO: | ID NO: | NO: |
| region | NO: 6362) | | | 6360) | 226) | 227) | 228) |
| variant 1 | | | | | | | |
| Humanized | QVQLVES | FSRYD | WVRQAP | TISSGG | RFTISRDNS | HSAYY | WGQG |
| anti- | GGGVVQ | MS | GKGLEW | SYTYYP | KNTLYLQ | VNYEN | TLVTV |
| calreticulin | PGRSLRL | (SEQ | VA (SEQ | DSVKG | MNSLRAED | AMDY | SS (SEQ |
| heavy chain | SCAASGF | ID NO: | ID NO: | (SEQ ID | TAVYYCAR | (SEQ | ID NO: |
| variable | A | 6358) | 6369) | NO: | (SEQ ID NO: | ID NO: | 228) |
| region | (SEQ ID | | | 6360) | 6371) | 227) | |
| variant 2 | NO: 229) | | | | | | |
| Humanized | EVQLVES | FSRYD | WVRQAP | TISSGG | RFTISRDNS | HSAYY | WGQG |
| anti- | GGGLVQ | MS | GKGLEW | SYTYYP | KNTLYLQ | VNYEN | TLVTV |
| calreticulin | PGGSLRL | (SEQ | VA (SEQ | DSVKG | MNSLRAED | AMDY | SS (SEQ |
| heavy chain | SCAASGF | ID NO: | ID NO: | (SEQ ID | TAVYYCAR | (SEQ | ID NO: |
| variable | A (SEQ ID | 6358) | 6369) | NO: | (SEQ ID NO: | ID NO: | 228) |
| region | NO: 6373) | | | 6360) | 6371) | 227) | |
| variant 3 | | | | | | | |
| 6C10 | EVQLVEK | FSEYW | WLRQAP | VIKYK | RFTISRDDS | GRDV | WGQG |
| Parental | GGGLVQ | MN | GKGLEW | YSNYA | KSSVYLQM | QDY | TMVTV |
| VH BK051 | PGKSLKL | (SEQ | VG (SEQ | TEFAES | TNLRAEDT | (SEQ | SS (SEQ |
| | SCTASGF | ID NO: | ID NO: | VKG | AIYYCAR | ID NO: | ID NO: |
| | T (SEQ ID | 7396) | 7398) | (SEQ ID | (SEQ ID NO: | 7403) | 6006) |
| | NO: 7394) | | | NO: | 7402) | | |
| | | | | 7400) | | | |
| 6C10 | EVQLVES | FSEYW | WLRQAP | VIKYK | RFTISRDDS | GRDV | WGQG |
| humanized | GGGLVQ | MN | GKGLEW | YSNYA | KSIVYLQM | QDY | TMVTV |
| heavy chain | PGPSLRL | (SEQ | VG (SEQ | TEFAES | NSLKTEDT | (SEQ | SS (SEQ |
| variable | SCTASGF | ID NO: | ID NO: | VKG | AVYYCAR | ID NO: | ID NO: |
| region | T (SEQ ID | 7396) | 7398) | (SEQ ID | (SEQ ID NO: | 7403) | 6006) |
| variant 1 | NO: 7423) | | | NO: | 7424) | | |
| (BK197) | | | | 7400) | | | |
| 6C10_hum1_ | EVQLVES | FSEYW | WLRQAP | VIKYK | RFTISRDDS | GRDV | WGQG |
| scFv VH | GGGLVQ | MN | GKGLEW | YSNYA | KSIVYLQM | QDY | TMVTV |
| (BKM0161) | PGRSLRL | (SEQ | VG (SEQ | TEFAES | NSLKTEDT | (SEQ | SS (SEQ |
| | SCTASGF | ID NO: | ID NO: | VKG | AVYYCAR | ID NO: | ID NO: |
| | T (SEQ ID | 7396) | 7398) | (SEQ ID | (SEQ ID NO: | 7403) | 6006) |
| | NO: 7436) | | | NO: | 7424) | | |
| | | | | 7400) | | | |
| 6C10_hum5_ | EVQLVES | SEYW | WLRQAP | VIKYK | RFTISRDDS | GRDV | WGQG |
| scFv VH | GGGLVQ | MN | GKGLEW | YSNYA | KSSVYLQM | QDY | TMVTV |
| (BKM0165) | PGGSLRL | (SEQ | VG (SEQ | TEFAES | NSLKTEDT | (SEQ | SS (SEQ |
| | SCAASGF | ID NO: | ID NO: | VKG | AVYYCAR | ID NO: | ID NO: |
| | TF (SEQ | 7444) | 7398) | (SEQ ID | (SEQ ID NO: | 7403) | 6006) |
| | ID NO: | | | NO: | 7445) | | |
| | 7443) | | | 7400) | | | |

TABLE 5
Exemplary light chain CDRs and FWRs of calreticulin-targeting antigen binding domains

| Ab ID | FWR1 | CDR1 | FWR2 | CDR2 | FWR3 | CDR3 | FWR4 |
|---|---|---|---|---|---|---|---|
| AbH-1L / | DVVMTQ | KSSQSLL | WLQQRP | LVSKL | GVPDRFSG | WQGTH | FGGG |
| AbH-2L | SPLSLPV | DSDGKT | GQSPRR | DS | SGSGTDFT | FPYT | TKVEI |
| | TLGQPAS | YLN | LIY (SEQ | (SEQ | LKISRVEA | (SEQ ID | K (SEQ |
| | ISC (SEQ | (SEQ ID | ID NO: | ID NO: | EDVGVYH | NO: | ID NO: |
| | ID NO: | NO: 6259) | 6278) | 6260) | C (SEQ ID | 6261) | 6280) |
| | 6277) | | | | NO: 6279) | | |
| AbM-1L / | DVVMTQ | KSSQSLL | WLLQRP | LVSKL | GVPDRFTG | WQGTH | FGGG |
| AbM-2L | TPLTLSV | DSDGKT | GQSPKR | DS | SGSGTDFT | FPYT | TKLEI |
| | TIGQPASI | YLN | LIY (SEQ | (SEQ | LKISRVEA | (SEQ ID | K (SEQ |
| | SC (SEQ | (SEQ ID | ID NO: | ID NO: | EDLGVYH | NO: | ID NO: |
| | ID NO: | NO: 6259) | 6282) | 6260) | C (SEQ ID | 6261) | 6284) |
| | 6281) | | | | NO: 6283) | | |
| Murine | NIVLTQS | RASESV | WYQQRP | LASNL | GVPARFSG | QQNNE | FGAG |
| anti- | PASLAVS | DSFGISF | GQPPKL | ES | SGSRTDFT | DPLT | TKLEL |
| calreticulin | LGQRATI | MH (SEQ | LIY (SEQ | (SEQ | LTIDPVEA | (SEQ ID | K (SEQ |
| antibody | SC (SEQ | ID NO: | ID NO: | ID NO: | DDAATYY | NO: 248) | ID NO: |
| 16B11.1 | ID NO: | 251) | 6375) | 246) | C (SEQ ID | | 249) |
| light chain | 6374) | | | | NO: 247) | | |
| variable | | | | | | | |
| region | | | | | | | |
| Humanized | DIVLTQT | RASESV | WYLQKP | LASNL | GVPDRFSG | QQNNE | FGQG |
| anti- | PLSLSVT | DSFGISF | GQSPQL | ES | SGSRTDFT | DPLT | TKLEI |
| calreticulin | PGQPASIS | MH (SEQ | LIY (SEQ | (SEQ | LKISRVEA | (SEQ ID | K (SEQ |
| light chain | C (SEQ ID | ID NO: | ID NO: | ID NO: | EDVGVYY | NO: 255) | ID NO: |
| variable | NO: 250) | 251) | 252) | 253) | C (SEQ ID | | 256) |
| region | | | | | NO: 254) | | |
| variant 1 | | | | | | | |
| Humanized | DIVLTQS | RASESV | WYQQRP | LASNL | GVPDRFSG | QQNNE | FGQG |
| anti- | PLSLPVT | DSFGISF | GQSPRL | ES | SGSRTDFT | DPLT | TKLEI |
| calreticulin | LGQPASI | MH (SEQ | LIY (SEQ | (SEQ | LKISRVEA | (SEQ ID | K (SEQ |
| light chain | SC (SEQ | ID NO: | ID NO: | ID NO: | EDVGVYY | NO: 262) | ID NO: |
| variable | ID NO: | 258) | 259) | 260) | C (SEQ ID | | 263) |
| region | 257) | | | | NO: 261) | | |
| variant 2 | | | | | | | |
| Humanized | DIVLTQT | RASESV | WYLQKP | LASNL | GVPDRFSG | QQNNE | FGQG |
| anti- | PLSLPVT | DSFGISF | GQSPQL | ES | SGSRTDFT | DPLT | TKLEI |
| calreticulin | PGEPASIS | MH (SEQ | LIY (SEQ | (SEQ | LKISRVEA | (SEQ ID | K (SEQ |
| light chain | C (SEQ ID | ID NO: | ID NO: | ID NO: | EDVGVYY | NO: 269) | ID NO: |
| variable | NO: 264) | 265) | 266) | 267) | C (SEQ ID | | 270) |
| region | | | | | NO: 268) | | |
| variant 3 | | | | | | | |
| Humanized | EIVLTQSP | RASESV | WYQQK | LASNL | GIPARFSG | QQNNE | FGQG |
| anti- | ATLSLSP | DSFGISF | PGQAPR | ES | SGSRTDFT | DPLT | TKLEI |
| calreticulin | GERATLS | MH (SEQ | LLIY | (SEQ | LTISSLEPE | (SEQ ID | K (SEQ |
| light chain | C (SEQ ID | ID NO: | (SEQ ID | ID NO: | DFAVYYC | NO: 276) | ID NO: |
| variable | NO: 271) | 272) | NO: 273) | 274) | (SEQ ID | | 277) |
| region | | | | | NO: 275) | | |
| variant 4 | | | | | | | |
| Humanized | DIQLTQS | RASESV | WYQQK | LASNL | GVPSRFSG | QQNNE | FGQG |
| anti- | PSSLSAS | DSFGISF | PGKAPK | ES | SGSRTDFT | DPLT | TKLEI |
| calreticulin | VGDRVTI | MH (SEQ | LLIY | (SEQ | FTISSLQPE | (SEQ ID | K (SEQ |
| light chain | TC (SEQ | ID NO: | (SEQ ID | ID NO: | DIATYYC | NO: 283) | ID NO: |
| variable | ID NO: | 279) | NO: 280) | 281) | (SEQ ID | | 284) |
| region | 278) | | | | NO: 282) | | |
| variant 5 | | | | | | | |
| 6C10 | EIVLTQSP | STSSSVT | WYQQK | STSNL | GVPTRFSG | QQCLSS | FGAG |
| Parental | ASKAASQ | TNYLH | PDTPPKL | AS | SGSGTSYS | PCT | TKLEI |
| VL BK052 | GEEVTIT | (SEQ ID | LIY (SEQ | (SEQ | LTISNMQG | (SEQ ID | K (SEQ |
| | C (SEQ ID | NO: 7387) | ID NO: | ID NO: | EDVATYY | NO: | ID NO: |
| | NO: 7386) | | 7388) | 7389) | C (SEQ ID | 7392) | 7393) |
| | | | | | NO: 7391) | | |
| 6C10 VL | EIVLTQSP | STSSSVT | WYQQK | STSNL | GVPTRFSG | QQSLSS | FGAG |
| BK210 - | ASKAASQ | TNYLH | PDTPPKL | AS | SGSGTSYS | PST | TKLEI |
| C91S/C96S | GEEVTIT | (SEQ ID | LIY (SEQ | (SEQ | LTISNMQG | (SEQ ID | K (SEQ |
| mutant | C (SEQ ID | NO: 7387) | ID NO: | ID NO: | EDVATYY | NO: | ID NO: |
| | NO: 7386) | | 7388) | 7389) | C (SEQ ID | 7410) | 7393) |
| | | | | | NO: 7391) | | |
| 6C10 VL | EIVLTQSP | STSSSVT | WYQQK | STSNL | GVPTRFSG | QQSLSS | FGAG |
| BK210 - | ASKAASQ | TNYLH | PDTPPKL | AS | SGSGTSYS | PCT | TKLEI |
| C91S | GEEVTIT | (SEQ ID | LIY (SEQ | (SEQ | LTISNMQG | (SEQ ID | K (SEQ |
| mutant | C (SEQ ID | NO: 7387) | ID NO: | ID NO | EDVATYY | NO | ID NO: |
| | NO: 7386) | | 7388) | 7389) | C (SEQ ID | 7415) | 7393) |
| | | | | | NO: 7391) | | |
| 6C10 VL | EIVLTQSP | STSSSVT | WYQQK | STSNL | GVPTRFSG | QQCLSS | FGAG |
| BK210 - | ASKAASQ | TNYLH | PDTPPKL | AS | SGSGTSYS | PST | TKLEI |
| C96S | GEEVTIT | (SEQ ID | LIY (SEQ | (SEQ | LTISNMQG | SEQ ID | K (SEQ |
| mutant | C (SEQ ID | NO: 7387) | ID NO: | ID NO: | EDVATYY | NO: | ID NO: |
| | NO: 7386) | | 7388) | 7389) | C (SEQ ID | 7417) | 7393) |
| | | | | | NO: 7391) | | |
| 6C10 | DIQLTQS | STSSSVT | WYQQK | STSNL | GVPSRFSG | QQCLSS | FGQG |
| humanized | PSFLSAS | TNYLH | PGKAPK | AS | SGSGTEYT | PCT | TKLEI |
| light chain | VGDRVTI | (SEQ ID | LLIY | (SEQ | LTISSLQPE | (SEQ ID | K (SEQ |
| variable | TC (SEQ | NO: 7387) | (SEQ ID | ID NO: | DFATYYC | NO: | ID NO: |
| region | ID NO: | | NO: 280) | 7389) | (SEQ ID | 7392) | 256) |
| variant 1 | 7426) | | | | NO: 7427) | | |
| (BK198) | | | | | | | |
| 6C10 | DIVLTQS | STSSSVT | WYQQK | STSNL | GVPDRFSG | QQCLSS | FGQG |
| humanized | PDSLAVS | TNYLH | PGQPPK | AS | SGSGTDYT | PCT | TKLEI |
| light chain | LGERATI | (SEQ ID | LLIY | (SEQ | LTISSLQAE | (SEQ ID | K (SEQ |
| variable | NC (SEQ | NO: 7387) | (SEQ ID | ID NO: | DVAVYYC | NO: | ID NO: |
| region | ID NO: | | NO: 7430) | 7389) | (SEQ ID | 7392) | 256) |
| variant 2 | 7429) | | | | NO: 7431) | | |
| (BK199) | | | | | | | |
| 6C10 | EIVLTQSP | STSSSVT | WYQQK | STSNL | GIPDRFSG | QQCLSS | FGQG |
| humanized | ATLSLSP | TNYLH | PGQAPK | AS | SGSGTDYT | PCT | TKLEI |
| light chain | GERATLS | (SEQ ID | LLIY | (SEQ | LTISRLEPE | (SEQ ID | K (SEQ |
| variable | C (SEQ ID | NO: 7387) | (SEQ ID | ID NO: | DFAVYYC | NO: | ID NO: |
| region | NO: 271) | | NO: 7433) | 7389) | (SEQ ID | 7392) | 256) |
| variant 3 | | | | | NO: 7434) | | |
| (BK200) | | | | | | | |
| 6C10_ | EIVLTQSP | STSSSVT | WYQQK | STSNL | GIPARFSG | QQCLSS | FGQG |
| hum2_scFv | ATLSLSP | TNYLH | PGQAPK | AS | SGSGTDYT | PCT | TKLEI |
| VL | GERATLS | (SEQ ID | LLIY | (SEQ | LTISSLQPE | (SEQ ID | K (SEQ |
| (BKM0162) | C (SEQ ID | NO: 7387) | (SEQ ID | ID NO: | DFAVYYC | NO: | ID NO: |
| | NO: 271) | | NO: 7433) | 7389) | (SEQ ID | 7392) | 256) |
| | | | | | NO: 7439) | | |
| 6C10_hum3_ | DIQLTQS | STSSSVT | WYQQK | STSNL | GVPSRFSG | QQSLSS | FGOG |
| scFv VL | PSFLSAS | TNYLH | PGKAPK | AS | SGSGTEYT | PST | TKLEI |
| (BKM0163) | VGDRVTI | (SEQ ID | LLIY | (SEQ | LTISSLQPE | (SEQ ID | K (SEQ |
| | TC (SEQ | NO: 7387) | (SEQ ID | ID NO: | DFATYYC | NO: | ID NO: |
| | ID NO: | | NO: 280) | 7389) | (SEQ ID | 7410) | 256) |
| | 7426) | | | | NO: 7427) | | |
| 6C10_hum4_ | EIVLTQSP | STSSSVT | WYQQK | STSNL | GIPARFSG | QQSLSS | FGQG |
| scFv VL | ATLSLSP | TNYLH | PGQAPK | AS | SGSGTDYT | PST | TKLEI |
| (BKM0164) | GERATLS | (SEQ ID | LLIY | (SEQ | LTISSLQPE | (SEQ ID | K (SEQ |
| | C (SEQ ID | NO: 7387) | (SEQ ID | ID NO: | DFAVYYC | NO: | ID NO: |
| | NO: 271) | | NO: 7433) | 7389) | (SEQ ID | 7410) | 256) |
| | | | | | NO: 7439) | | |

TABLE 6
Exemplary FWRs of calreticulin-targeting antigen binding

| SEQ ID NO | Description | Sequence |
|---|---|---|
| SEQ ID NO: | Ab-1 | X₁VQLX₂QSGX₃EX₄X_{5K}X₆GASVKX₇SCKASG, wherein: |
| 6224 | VHFWR1 | X₁ is not E, |
| | | X₂ is not E, |
| | | X₃ is not P, |
| | | X₄ is not L, |
| | | X₅ is not V, |
| | | X₆ is not T, or |
| | | X₇ is not I |
| SEQ ID NO: | Ab-1 | WVX₁QX₂X₃GX₄X₅LX₆WX₇G, wherein: |
| 6226 | VHFWR2 | X₁ is not K, |
| | | X₂ is not S, |
| | | X₃ is not H, |
| | | X₄ is not K, |
| | | X₅ is not S, |
| | | X₆ is not E, or |
| | | X₇ is not I |
| SEQ ID NO: | Ab-1 | X₁X₂TX₃TVDTSX₄STAYX₅X₆X₇X₈SLX₉SX₁₀DX₁₁AX₁₂YYCA, |
| 6228 | VHFWR3 | wherein: |
| | | X₁ is not K, |
| | | X₂ is not A, |
| | | X₃ is not F, |
| | | X₄ is not S, |
| | | X₅ is not M, |
| | | X₆ is not Q, |
| | | X₇ is not F, |
| | | X₈ is not N, |
| | | X₉ is not T, |
| | | X₁₀ is not G, |
| | | X₁₁ is not S, or |
| | | X₁₂ is not V |
| SEQ ID NO: | Ab-1 | WGQGTX₁VTVSS, wherein: |
| 6230 | VHFWR4 | X₁ is not S |
| SEQ ID NO: | Ab-2 | X₁VX₂LX₃ESGPX₄LVKX₅X₆X₇X₈LX₉LTCTVX₁₀G, wherein: |
| 6232 | VHFWR1 | X₁ is not D, |
| | | X₂ is not Q, |
| | | X₃ is not Q, |
| | | X₄ is not G, |
| | | X₅ is not N, |
| | | X₆ is not S, |
| | | X₇ is not Q, |
| | | X₈ is not S, |
| | | X₉ is not S, or |
| | | X₁₀ is not T |
| SEQ ID NO: | Ab-2 | WIRQX₁PGX₂X₃LEWX₄X₅, wherein: |
| 6234 | VHFWR2 | X₁ is not F, |
| | | X₂ is not N, |
| | | X₃ is not K, |
| | | X₄ is not M, or |
| | | X₅ is not G |
| SEQ ID NO: | Ab-2 | RX₁SITX₂DTSKX₃QX₄X₅LX₆X₇X₈X₉X₁₀X₁₁PX₁₂DTATYYCAR, |
| 6236 | VHFWR3 | wherein: |
| | | X₁ is not I, |
| | | X₂ is not R, |
| | | X₃ is not N, |
| | | X₄ is not F, |
| | | X₅ is not F, |
| | | X₆ is not Q, |
| | | X₇ is not L, |
| | | X₈ is not N, |
| | | X₉ is not S, |
| | | X₁₀ is not V, |
| | | X₁₁ is not T, or |
| | | X₁₂ is not E |
| SEQ ID NO: | Ab-2 | WGQGTX₁VTVSS, wherein: |
| 6230 | VHFWR4 | X₁ is not S |
| SEQ ID NO: | Ab-1/2 | DVVMTQX₁PLX₂LX₃VTX₄GQPASISC, wherein: |
| 6238 | VLFWR1 | X₁ is not T, |
| | | X₂ is not T, |
| | | X₃ is not S, or |
| | | X₄ is not I |
| SEQ ID NO: | Ab-1/2 | WLX₁QRPGQSPX₂RLIY, wherein: |
| 6240 | VLFWR2 | X₁ is not L, or |
| | | X₂ is not K |
| SEQ ID NO: | Ab-1/2 | GVPDRFX₁GSGSGTDFTLKISRVEAEDX₂GVYHC, wherein: |
| 6242 | VLFWR3 | X₁ is not T, or |
| | | X₂ is not L |
| SEQ ID NO: | Ab-1/2 | FGGGTKX₁EIK, wherein: |
| 6244 | VLFWR4 | X₁ is not L |

[0340] In some embodiments, the calreticulin-targeting antigen binding domain comprises a VH comprising a VH amino acid sequence as listed in Table 24, or an amino acid sequence having at least 75%, 80%, 85%, 90%, 95%, 96%, 97%, 98%, or 99% sequence identity thereto. In some embodiments, the calreticulin-targeting antigen binding domain comprises a VL comprising a VL amino acid sequence as listed in Table 24, or an amino acid sequence having at least 75%, 80%, 85%, 90%, 95%, 96%, 97%, 9800, or 9900 sequence identity thereto. In some embodiments, the calreticulin-targeting antigen binding domain comprises: (i) a VH comprising a VH amino acid sequence as listed in Table 24, or an amino acid sequence having at least 75%, 80%, 85%, 90%, 95%, 96%, 97%, 98%, or 99% sequence identity thereto, and (ii) a VL comprising a VL amino acid sequence as listed in Table 24, or an amino acid sequence having at least 75%, 80%, 85%, 90%, 95%, 96%, 97%, 98%, or 99% sequence identity thereto.

TABLE 24
Exemplary variable regions of calreticulin-targeting antigen binding (underlining
indicates CDR sequences)

| SEQ | | |
|---|---|---|
| ID NO | Description | Sequence |
| SEQ | AbH-1 heavy | QVQLVQSGAEVKKPGASVKVSCKASGYSFTGYYIHWVRQAPG |
| ID NO: | chain variable | QELGWMGYISCYNGASSYNQKFKGRVTMTVDTSISTAYTELSSL |
| 6247 | region | RSEDTATYYCA SSMDYWGQGTLVTVSS |
| SEQ | AbH-2 heavy | QVTLKESGPVLVKPTETLTLTCTVSGYSITSDYAWNWIRQPPGK |
| ID NO: | chain variable | ALEWLAYISYSGSTSYNPSLKSRLSITKDTSKSQVVLTMTNMDP |
| 6248 | region | VDTATYYCARDPPYYYGSWGQGTTVTVSS |
| SEQ | AbH-1 / AbH-2 | DVVMTQSPLSLPVTLGQPASISCKSSQSLLDSDGKTYLNWLQQR |
| ID NO: | light chain | PGQSPRRLIYLVSKLDSGVPDRFSGSGSGTDFTLKISRVEAEDVG |
| 6249 | variable region | VYHCWQGTHFPYTFGGGTKVEIK |
| SEQ | AbM-1 heavy | EVQLEQSGPELVKTGASVKISCKASGYSFTGYYIHWVKQSHGKS |
| ID NO: | chain variable | LEWIGYISCYNGASSYNQKFKGKATFTVDTSSSTAYMQFNSLTS |
| 6250 | region | GDSAVYYCA SSMDYWGQGTSVTVSS |
| SEQ | AbM-2 heavy | DVQLQESGPGLVKNSQSLSLTCTVTGYSITSDYAWNWIRQFPGN |
| ID NO: | chain variable | KLEWMGYISYSGSTSYNPSLKSRISITRDTSKNQFFLQLNSVTPED |
| 6251 | region | TATYYCARDPPYYYGSNGTWGQGTSVTVSS |
| SEQ | AbM-1 / AbM-2 | DVVMTQTPLTLSVTIGQPASISCKSSQSLLDSDGKTYLNWLLQRP |
| ID NO: | light chain | GQSPKRLIYLVSKLDSGVPDRFTGSGSGTDFTLKISRVEAEDLGV |
| 6252 | variable region | YHCWQGTHFPYTFGGGTKLEIK |
| SEQ | Murine anti- | EVKLVESGGGLVKPGGSLKLSCAASGFAFSRYDMSWVRQTPEK |
| ID NO: | calreticulin | RLEWVATISSGGSYTYYPDSVKGRFTISRDNARNTLYLQMSSLR |
| 6347 | antibody | SEDTALYYCARHSAYYVNYENAMDYWGQGTSVTVSS |
| | 16B11.1 heavy | |
| | chain variable | |
| | region | |
| SEQ | 6C10 Parental | EVQLVEKGGGLVQPGKSLKLSCTASGFTFSEYWMNWLRQAPG |
| ID NO: | VH BK051 | KGLEWVGVIKYKYSNYATEFAESVKGRFTISRDDSKSSVYLQMT |
| 7418 | | NLRAEDTAIYYCARGRDVQDYWGQGTMVTVSS |
| SEQ | 6C10 | EVQLVESGGGLVQPGPSLRLSCTASGFTFSEYWMNWLRQAPGK |
| ID NO: | humanized | GLEWVGVIKYKYSNYATEFAESVKGRFTISRDDSKSIVYLQMNS |
| 7425 | heavy chain | LKTEDTAVYYCARGRDVQDYWGQGTMVTVSS |
| | variable region | |
| | variant 1 | |
| | (BK197) | |
| SEQ | 6C10_hum1_sc | EVQLVESGGGLVQPGRSLRLSCTASGFTFSEYWMNWLRQAPGK |
| ID NO: | Fv VH | GLEWVGVIKYKYSNYATEFAESVKGRFTISRDDSKSIVYLQMNS |
| 7438 | (BKM0161) | LKTEDTAVYYCARGRDVQDYWGQGTMVTVSS |
| SEQ | 6C10_hum5_sc | EVQLVESGGGLVQPGGSLRLSCAASGFTFSEYWMNWLRQAPGK |
| ID NO: | Fv VH | GLEWVGVIKYKYSNYATEFAESVKGRFTISRDDSKSSVYLQMNS |
| 7446 | (BKM0165) | LKTEDTAVYYCARGRDVQDYWGQGTMVTVSS |
| SEQ | Murine anti- | NIVLTQSPASLAVSLGQRATISCRASESVDSFGISFMHWYQQRPG |
| ID NO: | calreticulin | QPPKLLIYLASNLESGVPARFSGSGSRTDFTLTIDPVEADDAATY |
| 6348 | antibody | YCQQNNEDPLTFGAGTKLELK |
| | 16B11.1 light | |
| | chain variable | |
| | region | |
| SEQ | Humanized anti- | QVQLVESGGGLVKPGGSLRLSCAASGFAFSRYDMSWIRQAPGK |
| ID NO: | calreticulin | GLEWVATISSGGSYTYYPDSVKGRFTISRDNAKNSLYLQMNSLR |
| 6349 | heavy chain | AEDTAVYYCARHSAYYVNYENAMDYWGQGTLVTVSS |
| | variable region | |
| | variant 1 | |
| SEQ | Humanized anti- | QVQLVESGGGVVQPGRSLRLSCAASGFAFSRYDMSWVRQAPGK |
| ID NO: | calreticulin | GLEWVATISSGGSYTYYPDSVKGRFTISRDNSKNTLYLQMNSLR |
| 6350 | heavy chain | AEDTAVYYCARHSAYYVNYENAMDYWGQGTLVTVSS |
| | variable region | |
| | variant 2 | |
| SEQ | Humanized anti- | EVQLVESGGGLVQPGGSLRLSCAASGFAFSRYDMSWVRQAPGK |
| ID NO: | calreticulin | GLEWVATISSGGSYTYYPDSVKGRFTISRDNSKNTLYLQMNSLR |
| 6351 | heavy chain | AEDTAVYYCARHSAYYVNYENAMDYWGQGTLVTVSS |
| | variable region | |
| | variant 3 | |
| SEQ | Humanized anti- | DIVLTQTPLSLSVTPGQPASISCRASESVDSFGISFMHWYLQKPG |
| ID NO: | calreticulin light | QSPQLLIYLASNLESGVPDRFSGSGSRTDFTLKISRVEAEDVGVY |
| 6352 | chain variable | YCQQNNEDPLTFGQGTKLEIK |
| | region variant 1 | |
| SEQ | Humanized anti- | DIVLTQSPLSLPVTLGQPASISCRASESVDSFGISFMHWYQQRPG |
| ID NO: | calreticulin light | QSPRLLIYLASNLESGVPDRFSGSGSRTDFTLKISRVEAEDVGVY |
| 6353 | chain variable | YCQQNNEDPLTFGQGTKLEIK |
| | region variant 2 | |
| SEQ | Humanized anti- | DIVLTQTPLSLPVTPGEPASISCRASESVDSFGISFMHWYLQKPGQ |
| ID NO: | calreticulin light | SPQLLIYLASNLESGVPDRFSGSGSRTDFTLKISRVEAEDVGVYY |
| 6354 | chain variable | CQQNNEDPLTFGQGTKLEIK |
| | region variant 3 | |
| SEQ | Humanized anti- | EIVLTQSPATLSLSPGERATLSCRASESVDSFGISFMHWYQQKPG |
| ID NO: | calreticulin light | QAPRLLIYLASNLESGIPARFSGSGSRTDFTLTISSLEPEDFAVYYC |
| 6355 | chain variable | QQNNEDPLTFGQGTKLEIK |
| | region variant 4 | |
| SEQ | Humanized anti- | DIQLTQSPSSLSASVGDRVTITCRASESVDSFGISFMHWYQQKPG |
| ID NO: | calreticulin light | KAPKLLIYLASNLESGVPSRFSGSGSRTDFTFTISSLQPEDIATYYC |
| 6356 | chain variable | QQNNEDPLTFGQGTKLEIK |
| | region variant 5 | |
| SEQ | 6C10 Parental | EIVLTQSPASKAASQGEEVTITCSTSSSVTTNYLHWYQQKPDTPP |
| ID NO: | VL BK052 | KLLIYSTSNLASGVPTRFSGSGSGTSYSLTISNMQGEDVATYYCQ |
| 7419 | | QCLSSPCTFGAGTKLEIK |
| SEQ | 6C10 VL | EIVLTQSPASKAASQGEEVTITCSTSSSVTTNYLHWYQQKPDTPP |
| ID NO: | BK210 - | KLLIYSTSNLASGVPTRFSGSGSGTSYSLTISNMQGEDVATYYCQ |
| 7420 | C91S/C96S | QSLSSPSTFGAGTKLEIK |
| | mutant | |
| SEQ | 6C10 VL | EIVLTQSPASKAASQGEEVTITCSTSSSVTTNYLHWYQQKPDTPP |
| ID NO: | BK210 - C91S | KLLIYSTSNLASGVPTRFSGSGSGTSYSLTISNMQGEDVATYYCQ |
| 7421 | mutant | QSLSSPCTFGAGTKLEIK |
| SEQ | 6C10 VL | EIVLTQSPASKAASQGEEVTITCSTSSSVTTNYLHWYQQKPDTPP |
| ID NO: | BK210 - C96S | KLLIYSTSNLASGVPTRFSGSGSGTSYSLTISNMQGEDVATYYCQ |
| 7422 | mutant | QCLSSPSTFGAGTKLEIK |
| SEQ | 6C10 | DIQLTQSPSFLSASVGDRVTITCSTSSSVTTNYLHWYQQKPGKAP |
| ID NO: | humanized light | KLLIYSTSNLASGVPSRFSGSGSGTEYTLTISSLQPEDFATYYCQQ |
| 7428 | chain variable | CLSSPCTFGQGTKLEIK |
| | region variant 1 | |
| | (BK198) | |
| SEQ | 6C10 | DIVLTQSPDSLAVSLGERATINCSTSSSVTTNYLHWYQQKPGQPP |
| ID NO: | humanized light | KLLIYSTSNLASGVPDRFSGSGSGTDYTLTISSLQAEDVAVYYCQ |
| 7432 | chain variable | QCLSSPCTFGQGTKLEIK |
| | region variant 2 | |
| | (BK199) | |
| SEQ | 6C10 | EIVLTQSPATLSLSPGERATLSCSTSSSVTTNYLHWYQQKPGQAP |
| ID NO: | humanized light | KLLIYSTSNLASGIPDRFSGSGSGTDYTLTISRLEPEDFAVYYCQQ |
| 7435 | chain variable | CLSSPCTFGQGTKLEIK |
| | region variant 3 | |
| | (BK200) | |
| SEQ | 6C10_ | EIVLTQSPATLSLSPGERATLSCSTSSSVTTNYLHWYQQKPGQAP |
| ID NO: | hum2_scFv VL | KLLIYSTSNLASGIPARFSGSGSGTDYTLTISSLQPEDFAVYYCQQ |
| 7440 | (BKM0162) | CLSSPCTFGQGTKLEIK |
| SEQ | 6C10_hum3_sc | DIQLTQSPSFLSASVGDRVTITCSTSSSVTTNYLHWYQQKPGKAP |
| ID NO: | Fv VL | KLLIYSTSNLASGVPSRFSGSGSGTEYTLTISSLQPEDFATYYCQQ |
| 7441 | (BKM0163) | SLSSPSTFGQGTKLEIK |
| SEQ | 6C10_hum4_sc | EIVLTQSPATLSLSPGERATLSCSTSSSVTTNYLHWYQQKPGQAP |
| ID NO: | Fv VL | KLLIYSTSNLASGIPARFSGSGSGTDYTLTISSLQPEDFAVYYCQQ |
| 7442 | (BKM0164) | SLSSPSTFGQGTKLEIK |

[0341] In some embodiments, the calreticulin-targeting antigen binding domain comprises an scFv comprising an amino acid sequence as listed in Table 25, or an amino acid sequence having at least 750%, 80%, 85%, 90%, 950%, 960%, 97%, 980%, or 99% sequence identity thereto. In some embodiments, the calreticulin-targeting antigen binding domain comprises an scFv comprising a VH amino acid sequence as listed in Table 25, or an amino acid sequence having at least 75%, 80%, 850%, 90%, 95%, 960%, 97%, 98%, or 99% sequence identity thereto. In some embodiments, the calreticulin-targeting antigen binding domain comprises an scFv comprising a VL amino acid sequence as listed in Table 25, or an amino acid sequence having at least 750%, 80%, 85%, 90%, 95%, 96%, 97%, 98%, or 99% sequence identity thereto. In some embodiments, the calreticulin-targeting antigen binding domain comprises an scFv comprising a spacer amino acid sequence as listed in Table 25, or an amino acid sequence having at least 75%, 80%, 85%, 90%, 95%, 96%, 97%, 98%, or 99% sequence identity thereto.

TABLE 25
Exemplary scFv sequences for calreticulin-targeting antigen binding (underlining
indicates CDR sequences)

| SEQ ID | | |
|---|---|---|
| NO: | Description | Sequence |
| 7499 | 6C10_hum1_ | EVQLVESGGGLVQPGRSLRLSCTASGFTFSEYWMNWLRQAPGKG |
| | scFv | LEWVGVIKYKYSNYATEFAESVKGRFTISRDDSKSIVYLQMNSLK |
| | (BKM0161) | TEDTAVYYCARGRDVQDYWGQGTMVTVSSGGGGSGGGGSGGG |
| | | GSGGGGSDIQLTQSPSFLSASVGDRVTITCSTSSSVTTNYLHWYQQ |
| | | KPGKAPKLLIYSTSNLASGVPSRFSGSGSGTEYTLTISSLQPEDFAT |
| | | YYCQQCLSSPCTFGQGTKLEIK |
| 7500 | 6C10_ | EVQLVESGGGLVQPGRSLRLSCTASGFTFSEYWMNWLRQAPGKG |
| | hum2_scFv | LEWVGVIKYKYSNYATEFAESVKGRFTISRDDSKSIVYLQMNSLK |
| | (BKM0162) | TEDTAVYYCARGRDVQDYWGQGTMVTVSSGGGGSGGGGSGGG |
| | | GSGGGGSEIVLTQSPATLSLSPGERATLSCSTSSSVTTNYLHWYQQ |
| | | KPGQAPKLLIYSTSNLASGIPARFSGSGSGTDYTLTISSLQPEDFAV |
| | | YYCQQCLSSPCTFGQGTKLEIK |
| 7501 | 6C10_hum3_ | EVQLVESGGGLVQPGRSLRLSCTASGFTFSEYWMNWLRQAPGKG |
| | scFv | LEWVGVIKYKYSNYATEFAESVKGRFTISRDDSKSIVYLQMNSLK |
| | (BKM0163) | TEDTAVYYCARGRDVQDYWGQGTMVTVSSGGGGSGGGGSGGG |
| | | GSGGGGSDIQLTQSPSFLSASVGDRVTITCSTSSSVTTNYLHWYQQ |
| | | KPGKAPKLLIYSTSNLASGVPSRFSGSGSGTEYTLTISSLQPEDFAT |
| | | YYCQQSLSSPSTFGQGTKLEIK |
| 7502 | 6C10_hum4_ | EVQLVESGGGLVQPGRSLRLSCTASGFTFSEYWMNWLRQAPGKG |
| | scFv | LEWVGVIKYKYSNYATEFAESVKGRFTISRDDSKSIVYLQMNSLK |
| | (BKM0164) | TEDTAVYYCARGRDVQDYWGQGTMVTVSSGGGGSGGGGSGGG |
| | | GSGGGGSEIVLTQSPATLSLSPGERATLSCSTSSSVTTNYLHWYQQ |
| | | KPGQAPKLLIYSTSNLASGIPARFSGSGSGTDYTLTISSLQPEDFAV |
| | | YYCQQSLSSPSTFGQGTKLEIK |
| 7503 | 6C10_hum5_ | EVQLVESGGGLVQPGGSLRLSCAASGFTFSEYWMNWLRQAPGKG |
| | scFv | LEWVGVIKYKYSNYATEFAESVKGRFTISRDDSKSSVYLQMNSLK |
| | (BKM0165) | TEDTAVYYCARGRDVQDYWGQGTMVTVSSGGGGSGGGGSGGG |
| | | GSGGGGSDIQLTQSPSFLSASVGDRVTITCSTSSSVTTNYLHWYQQ |
| | | KPGKAPKLLIYSTSNLASGVPSRFSGSGSGTEYTLTISSLQPEDFAT |
| | | YYCQQCLSSPCTFGQGTKLEIK |
| 7504 | 6C10_hum6_ | EVQLVESGGGLVQPGGSLRLSCAASGFTFSEYWMNWLRQAPGKG |
| | scFv | LEWVGVIKYKYSNYATEFAESVKGRFTISRDDSKSSVYLQMNSLK |
| | (BKM0166) | TEDTAVYYCARGRDVQDYWGQGTMVTVSSGGGGSGGGGSGGG |
| | | GSGGGGSEIVLTQSPATLSLSPGERATLSCSTSSSVTTNYLHWYQQ |
| | | KPGQAPKLLIYSTSNLASGIPARFSGSGSGTDYTLTISSLQPEDFAV |
| | | YYCQQCLSSPCTFGQGTKLEIK |
| 7505 | 6C10_hum7_ | EVQLVESGGGLVQPGGSLRLSCAASGFTFSEYWMNWLRQAPGKG |
| | scFv | LEWVGVIKYKYSNYATEFAESVKGRFTISRDDSKSSVYLQMNSLK |
| | (BKM0167) | TEDTAVYYCARGRDVQDYWGQGTMVTVSSGGGGSGGGGSGGG |
| | | GSGGGGSDIQLTQSPSFLSASVGDRVTITCSTSSSVTTNYLHWYQQ |
| | | KPGKAPKLLIYSTSNLASGVPSRFSGSGSGTEYTLTISSLQPEDFAT |
| | | YYCQQSLSSPSTFGQGTKLEIK |
| 7506 | 6C10_hum8_ | EVQLVESGGGLVQPGGSLRLSCAASGFTFSEYWMNWLRQAPGKG |
| | scFv | LEWVGVIKYKYSNYATEFAESVKGRFTISRDDSKSSVYLQMNSLK |
| | (BKM0168) | TEDTAVYYCARGRDVQDYWGQGTMVTVSSGGGGSGGGGSGGG |
| | | GSGGGGSEIVLTQSPATLSLSPGERATLSCSTSSSVTTNYLHWYQQ |
| | | KPGQAPKLLIYSTSNLASGIPARFSGSGSGTDYTLTISSLQPEDFAV |
| | | YYCQQSLSSPSTFGQGTKLEIK |

[0342] In some embodiments, the calreticulin-targeting antigen binding domain comprises an Fc region. In some embodiments, the Fc region is chosen from, e.g., the heavy chain constant regions of IgG1, IgG2, IgG3, IgG4, IgM, IgA1, IgA2, IgD, and IgE. In some embodiments, the Fc region is chosen from the heavy chain constant regions of IgG1, IgG2, IgG3, and IgG4. In some embodiments, the Fc region is chosen from the heavy chain constant region of IgG1 or IgG2 (e.g., human IgG1, or IgG2). In some embodiments, the heavy chain constant region is human IgG2a. In some embodiment, the heavy chain constant region comprises a murine IgG2a sequence, e.g., SEQ ID NO: 7448 below, or an amino acid sequence having at least 75%, 80%, 85%, 90%, 95%, 96%, 97%, 98%, or 99% sequence identity thereto:

(SEQ ID NO: 7448)
AKTTAPSVYPLAPVCGDTTGSSVTLGCLVKGYFPEPVTLTWNSGSLSSGV
HTFPAVLQSDLYTLSSSVTVTSSTWPSQSITCNVAHPASSTKVDKKIEPR
GPTIKPCPPCKCPAPNLLGGPSVFIFPPKIKDVLMISLSPIVTCVVVDVS
EDDPDVQISWFVNNVEVHTAQTQTHREDYNSTLRVVSALPIQHQDWMSGK
EFKCKVNNKDLPAPIERTISKPKGSVRAPQVYVLPPPEEEMTKKQVTLTC
MVTDFMPEDIYVEWTNNGKTELNYKNTEPVLDSDGSYFMYSKLRVEKKNW
VERNSYSCSVVHEGLHNHHTTKSFSRTPGK

[0343] In some embodiments, the Fc region comprises a Fc region variant, e.g., as described herein. In some embodiments, the Fc region comprises one or more mutations. In some embodiments, the Fc region comprises an LALAPG mutation. In some embodiments, the Fc region comprises the amino acid sequence of a murine IgG2a-LALAPG variant, e.g., the sequence of SEQ ID NOs: 7449 or 7450 below, or an amino acid sequence having at least 75%, 80%, 85%, 90%, 95%, 96%, 97%, 98%, or 99% sequence identity thereto:

(SEQ ID NO: 7449)
AKTTAPSVYPLAPVCGDTTGSSVTLGCLVKGYFPEPVTLTWNSGSLSSGV
HTFPAVLQSDLYTLSSSVTVTSSTWPSQSITCNVAHPASSTKVDKKIEPR
GPTIKPCPPCKCPAPNAAGGPSVFIFPPKIKDVLMISLSPIVTCVVVDVS
EDDPDVQISWFVNNVEVHTAQTQTHREDYNSTLRVVSALPIQHQDWMSGK
EFKCKVNNKDLGAPIERTISKPKGSVRAPQVYVLPPPEEEMTKKQVTLTC
MVTDFMPEDIYVEWTNNGKTELNYKNTEPVLDSDGSYFMYSKLRVEKKNW
VERNSYSCSVVHEGLHNHHTTKSFSRTPGK
(SEQ ID NO: 7450)
AKTTAPSVYPLAPVCGDTTGSSVTLGCLVKGYFPEPVTLTWNSGSLSSGV
HTFPAVLQSDLYTLSSSVTVTSSTWPSQSITCNVAHPASSTKVDKKIEPR
GPTIKPCPPCKCPAPNAAGGPSVFIFPPKIKDVLMISLSPIVTCVVVDVS
EDDPDVQISWFVNNVEVHTAQTQTHREDYNSTLRVVSALPIQHQDWMSGK
EFKCKVNNKDLGAPIERTISKPKGSVRAPQVYVLPPCEEEMTKKQVTLWC
MVTDFMPEDIYVEWTNNGKTELNYKNTEPVLDSDGSYFMYSKLRVEKKNW
VERNSYSCSVVHEGLHNHHTTKSFSRTPGK

[0344] In some embodiments, the Fc region comprises the amino acid sequence of a human IgG2a N2976A variant, e.g., the sequence of SEQ ID NO: 7453 below, or an amino acid sequence having at least 75%, 80%, 85%, 90%, 95%, 96%, 97%, 98%, or 99% sequence identity thereto:

(SEQ ID NO: 7453)
ASTKGPSVFPLAPSSKSTSGGTAALGCLVKDYFPEPVTVSWNSGALTSGV
HTFPAVLQSSGLYSLSSVVTVPSSSLGTQTYICNVNHKPSNTKVDKKVEP
KSCDKTHTCPPCPAPELLGGPSVFLFPPKPKDTLMISRTPEVTCVVVDVS
HEDPEVKFNWYVDGVEVHNAKTKPREEQYGSTYRVVSVLTVLHQDWLNGK
EYKCKVSNKALPAPIEKTISKAKGQPREPQVYTLPPSREEMTKNQVSLTC
LVKGFYPSDIAVEWESNGQPENNYKTTPPVLDSDGSFFLYSKLTVDKSRW
QQGNVFSCSVMHEALHNHYTQKSLSLSPGK

[0345] In some embodiments, the calreticulin-targeting antigen binding domain comprises a light chain constant region, e.g., a CL kappa region, e.g., a human CL kappa region. In some embodiments, the light chain constant region comprises the amino acid sequence of SEQ ID NO: 7451 below, or an amino acid sequence having at least 75%, 80%, 85%, 90%, 95%, 96%, 97%, 98%, or 99% sequence identity thereto:

(SEQ ID NO: 7451)
RADAAPTVSIFPPSSEQLTSGGASVVCFLNNFYPKDINVKWKIDGSERQ
NGVLNSWTDQDSKDSTYSMSSTLTLTKDEYERHNSYTCEATHKTSTSPI
VKSFNRNEC

[0346] In some embodiments, the light chain constant region comprises the amino acid sequence of SEQ ID NO: 7454 below, or an amino acid sequence having at least 75%, 80%, 85%, 90%, 95%, 96%, 97%, 98%, or 99% sequence identity thereto:

(SEQ ID NO: 7454)
RTVAAPSVFIFPPSDEQLKSGTASVVCLLNNFYPREAKVQWKVDNALQS
GNSQESVTEQDSKDSTYSLSSTLTLSKADYEKHKVYACEVTHQGLSSPV
TKSFNRGEC

### Additional Calreticulin-Targeting Antigen Binding Domains

[0347] In some embodiments, the calreticulin-targeting antigen binding domain comprises any CDR amino acid sequence or variable region amino acid sequence disclosed in Tables 16-19. In some embodiments, the calreticulin-targeting antigen binding domain comprises a VH comprising a heavy chain complementarity determining region 1 (VHCDR1) amino acid sequence of SEQ ID NO: 6253 (or a sequence with no more than 1, 2, 3, or 4 mutations, e.g., substitutions, additions, or deletions), a VHCDR2 amino acid sequence of SEQ ID NO: 243 (or a sequence with no more than 1, 2, 3, or 4 mutations, e.g., substitutions, additions, or deletions), and/or a VHCDR3 amino acid sequence of SEQ ID NO: 6255 (or a sequence with no more than 1, 2, 3, or 4 mutations, e.g., substitutions, additions, or deletions). In some embodiments, the calreticulin-targeting antigen binding domain comprises a VH comprising a VHCDR1 amino acid sequence of SEQ ID NO: 6253, a VHCDR2 amino acid sequence of SEQ ID NO: 243, and/or a VHCDR3 amino acid sequence of SEQ ID NO: 6255. In some embodiments, the calreticulin-targeting antigen binding domain comprises a VL comprising a light chain complementarity determining region 1 (VLCDR1) amino acid sequence of SEQ ID NO: 6259 (or a sequence with no more than 1, 2, 3, or 4 mutations, e.g., substitutions, additions, or deletions), a VLCDR2 amino acid sequence of SEQ ID NO: 6260 (or a sequence with no more than 1, 2, 3, or 4 mutations, e.g., substitutions, additions, or deletions), and/or a VLCDR3 amino acid sequence of SEQ ID NO: 6261 (or a sequence with no more than 1, 2, 3, or 4 mutations, e.g., substitutions, additions, or deletions). In some embodiments, the calreticulin-targeting antigen binding domain comprises a VL comprising a VLCDR1 amino acid sequence of SEQ ID NO: 6259, a VLCDR2 amino acid sequence of SEQ ID NO: 6260, and a VLCDR3 amino acid sequence of SEQ ID NO: 6261. In some embodiments, the calreticulin-targeting antigen binding domain comprises a VH comprising the amino acid sequence of SEQ ID NO: 244 (or an amino acid sequence having at least about 77%, 80%, 85%, 90%, 95%, or 99% sequence identity thereto). In some embodiments, the calreticulin-targeting antigen binding domain comprises a VL comprising the amino acid sequence of SEQ ID NO: 245 (or an amino acid sequence having at least about 93%, 95%, or 99% sequence identity thereto). In some embodiments, the calreticulin-targeting antigen binding domain comprises a VH comprising the amino acid sequence of SEQ ID NO: 244 and/or a VL comprising the amino acid sequence of SEQ ID NO: 245. In some embodiments, the calreticulin-targeting antigen binding domain comprises a VH comprising the amino acid sequence of SEQ ID NO: 6372, 234, 235, 236, or 237, or an amino acid sequence having at least about 80%, 85%, 90%, 95%, or 99% sequence identity thereto. In some embodiments, the calreticulin-targeting antigen binding domain comprises a VL comprising the amino acid sequence of SEQ ID NO: 238, 239, 240, 241, or 242, or an amino acid sequence having at least about 80%, 85%, 90%, 95%, or 99% sequence identity thereto. In some embodiments, the calreticulin-targeting antigen binding domain comprises a VH comprising the amino acid sequence of SEQ ID NO: 6372 (or an amino acid sequence having at least about 80%, 85%, 90%, 95%, or 99% sequence identity thereto) and a VL comprising the amino acid sequence of SEQ ID NO: 238 (or an amino acid sequence having at least about 80%, 85%, 90%, 95%, or 99% sequence identity thereto). In some embodiments, the calreticulin-targeting antigen binding domain comprises a VH comprising the amino acid sequence of SEQ ID NO: 6372 and a VL comprising the amino acid sequence of SEQ ID NO: 238. In some embodiments, the calreticulin-targeting antigen binding domain comprises a VH comprising the amino acid sequence of SEQ ID NO: 234 (or an amino acid sequence having at least about 80%, 85%, 90%, 95%, or 99% sequence identity thereto) and a VL comprising the amino acid sequence of SEQ ID NO: 238 (or an amino acid sequence having at least about 80%, 85%, 90%, 95%, or 99% sequence identity thereto). In some embodiments, the calreticulin-targeting antigen binding domain comprises a VH comprising the amino acid sequence of SEQ ID NO: 234 and a VL comprising the amino acid sequence of SEQ ID NO: 238. In some embodiments, the calreticulin-targeting antigen binding domain comprises a VH comprising the amino acid sequence of SEQ ID NO: 235 (or an amino acid sequence having at least about 80%, 85%, 90%, 95%, or 99% sequence identity thereto) and a VL comprising the amino acid sequence of SEQ ID NO: 238 (or an amino acid sequence having at least about 80%, 85%, 90%, 95%, or 99% sequence identity thereto). In some embodiments, the calreticulin-targeting antigen binding domain comprises a VH comprising the amino acid sequence of SEQ ID NO: 235 and a VL comprising the amino acid sequence of SEQ ID NO: 238. In some embodiments, the calreticulin-targeting antigen binding domain comprises a VH comprising the amino acid sequence of SEQ ID NO: 236 (or an amino acid sequence having at least about 80%, 85%, 90%, 95%, or 99% sequence identity thereto) and a VL comprising the amino acid sequence of SEQ ID NO: 238 (or an amino acid sequence having at least about 80%, 85%, 90%, 95%, or 99% sequence identity thereto). In some embodiments, the calreticulin-targeting antigen binding domain comprises a VH comprising the amino acid sequence of SEQ ID NO: 236 and a VL comprising the amino acid sequence of SEQ ID NO: 238. In some embodiments, the calreticulin-targeting antigen binding domain comprises a VH comprising the amino acid sequence of SEQ ID NO: 237 (or an amino acid sequence having at least about 80%, 85%, 90%, 95%, or 99% sequence identity thereto) and a VL comprising the amino acid sequence of SEQ ID NO: 238 (or an amino acid sequence having at least about 80%, 85%, 90%, 95%, or 99% sequence identity thereto). In some embodiments, the calreticulin-targeting antigen binding domain comprises a VH comprising the amino acid sequence of SEQ ID NO: 237 and a VL comprising the amino acid sequence of SEQ ID NO: 238. In some embodiments, the calreticulin-targeting antigen binding domain comprises a VH comprising the amino acid sequence of SEQ ID NO: 6372 (or an amino acid sequence having at least about 80%, 85%, 90%, 95%, or 99% sequence identity thereto) and a VL comprising the amino acid sequence of SEQ ID NO: 239 (or an amino acid sequence having at least about 80%, 85%, 90%, 95%, or 99% sequence identity thereto). In some embodiments, the calreticulin-targeting antigen binding domain comprises a VH comprising the amino acid sequence of SEQ ID NO: 6372 and a VL comprising the amino acid sequence of SEQ ID NO: 239. In some embodiments, the calreticulin-targeting antigen binding domain comprises a VH comprising the amino acid sequence of SEQ ID NO: 234 (or an amino acid sequence having at least about 80%, 85%, 90%, 95%, or 99% sequence identity thereto) and a VL comprising the amino acid sequence of SEQ ID NO: 239 (or an amino acid sequence having at least about 80%, 85%, 90%, 95%, or 99% sequence identity thereto). In some embodiments, the calreticulin-targeting antigen binding domain comprises a VH comprising the amino acid sequence of SEQ ID NO: 234 and a VL comprising the amino acid sequence of SEQ ID NO: 239. In some embodiments, the calreticulin-targeting antigen binding domain comprises a VH comprising the amino acid sequence of SEQ ID NO: 235 (or an amino acid sequence having at least about 80%, 85%, 90%, 95%, or 99% sequence identity thereto) and a VL comprising the amino acid sequence of SEQ ID NO: 239 (or an amino acid sequence having at least about 80%, 85%, 90%, 95%, or 99% sequence identity thereto). In some embodiments, the calreticulin-targeting antigen binding domain comprises a VH comprising the amino acid sequence of SEQ ID NO: 235 and a VL comprising the amino acid sequence of SEQ ID NO: 239. In some embodiments, the calreticulin-targeting antigen binding domain comprises a VH comprising the amino acid sequence of SEQ ID NO: 236 (or an amino acid sequence having at least about 80%, 85%, 90%, 95%, or 99% sequence identity thereto) and a VL comprising the amino acid sequence of SEQ ID NO: 239 (or an amino acid sequence having at least about 80%, 85%, 90%, 95%, or 99% sequence identity thereto). In some embodiments, the calreticulin-targeting antigen binding domain comprises a VH comprising the amino acid sequence of SEQ ID NO: 236 and a VL comprising the amino acid sequence of SEQ ID NO: 239. In some embodiments, the calreticulin-targeting antigen binding domain comprises a VH comprising the amino acid sequence of SEQ ID NO: 237 (or an amino acid sequence having at least about 80%, 85%, 90%, 95%, or 99% sequence identity thereto) and a VL comprising the amino acid sequence of SEQ ID NO: 239 (or an amino acid sequence having at least about 80%, 85%, 90%, 95%, or 99% sequence identity thereto). In some embodiments, the calreticulin-targeting antigen binding domain comprises a VH comprising the amino acid sequence of SEQ ID NO: 237 and a VL comprising the amino acid sequence of SEQ ID NO: 239. In some embodiments, the calreticulin-targeting antigen binding domain comprises a VH comprising the amino acid sequence of SEQ ID NO: 6372 (or an amino acid sequence having at least about 80%, 85%, 90%, 95%, or 99% sequence identity thereto) and a VL comprising the amino acid sequence of SEQ ID NO: 240 (or an amino acid sequence having at least about 80%, 85%, 90%, 95%, or 99% sequence identity thereto). In some embodiments, the calreticulin-targeting antigen binding domain comprises a VH comprising the amino acid sequence of SEQ ID NO: 6372 and a VL comprising the amino acid sequence of SEQ ID NO: 240. In some embodiments, the calreticulin-targeting antigen binding domain comprises a VH comprising the amino acid sequence of SEQ ID NO: 234 (or an amino acid sequence having at least about 80%, 85%, 90%, 95%, or 99% sequence identity thereto) and a VL comprising the amino acid sequence of SEQ ID NO: 240 (or an amino acid sequence having at least about 80%, 85%, 90%, 95%, or 99% sequence identity thereto). In some embodiments, the calreticulin-targeting antigen binding domain comprises a VH comprising the amino acid sequence of SEQ ID NO: 234 and a VL comprising the amino acid sequence of SEQ ID NO: 240. In some embodiments, the calreticulin-targeting antigen binding domain comprises a VH comprising the amino acid sequence of SEQ ID NO: 235 (or an amino acid sequence having at least about 80%, 85%, 90%, 95%, or 99% sequence identity thereto) and a VL comprising the amino acid sequence of SEQ ID NO: 240 (or an amino acid sequence having at least about 80%, 85%, 90%, 95%, or 99% sequence identity thereto). In some embodiments, the calreticulin-targeting antigen binding domain comprises a VH comprising the amino acid sequence of SEQ ID NO: 235 and a VL comprising the amino acid sequence of SEQ ID NO: 240. In some embodiments, the calreticulin-targeting antigen binding domain comprises a VH comprising the amino acid sequence of SEQ ID NO: 236 (or an amino acid sequence having at least about 80%, 85%, 90%, 95%, or 99% sequence identity thereto) and a VL comprising the amino acid sequence of SEQ ID NO: 240 (or an amino acid sequence having at least about 80%, 85%, 90%, 95%, or 99% sequence identity thereto). In some embodiments, the calreticulin-targeting antigen binding domain comprises a VH comprising the amino acid sequence of SEQ ID NO: 236 and a VL comprising the amino acid sequence of SEQ ID NO: 240. In some embodiments, the calreticulin-targeting antigen binding domain comprises a VH comprising the amino acid sequence of SEQ ID NO: 237 (or an amino acid sequence having at least about 80%, 85%, 90%, 95%, or 99% sequence identity thereto) and a VL comprising the amino acid sequence of SEQ ID NO: 240 (or an amino acid sequence having at least about 80%, 85%, 90%, 95%, or 99% sequence identity thereto). In some embodiments, the calreticulin-targeting antigen binding domain comprises a VH comprising the amino acid sequence of SEQ ID NO: 237 and a VL comprising the amino acid sequence of SEQ ID NO: 240. In some embodiments, the calreticulin-targeting antigen binding domain comprises a VH comprising the amino acid sequence of SEQ ID NO: 6372 (or an amino acid sequence having at least about 80%, 85%, 90%, 95%, or 99% sequence identity thereto) and a VL comprising the amino acid sequence of SEQ ID NO: 241 (or an amino acid sequence having at least about 80%, 85%, 90%, 95%, or 99% sequence identity thereto). In some embodiments, the calreticulin-targeting antigen binding domain comprises a VH comprising the amino acid sequence of SEQ ID NO: 6372 and a VL comprising the amino acid sequence of SEQ ID NO: 241. In some embodiments, the calreticulin-targeting antigen binding domain comprises a VH comprising the amino acid sequence of SEQ ID NO: 234 (or an amino acid sequence having at least about 80%, 85%, 90%, 95%, or 99% sequence identity thereto) and a VL comprising the amino acid sequence of SEQ ID NO: 241 (or an amino acid sequence having at least about 80%, 85%, 90%, 95%, or 99% sequence identity thereto). In some embodiments, the calreticulin-targeting antigen binding domain comprises a VH comprising the amino acid sequence of SEQ ID NO: 234 and a VL comprising the amino acid sequence of SEQ ID NO: 241. In some embodiments, the calreticulin-targeting antigen binding domain comprises a VH comprising the amino acid sequence of SEQ ID NO: 235 (or an amino acid sequence having at least about 80%, 85%, 90%, 95%, or 99% sequence identity thereto) and a VL comprising the amino acid sequence of SEQ ID NO: 241 (or an amino acid sequence having at least about 80%, 85%, 90%, 95%, or 99% sequence identity thereto). In some embodiments, the calreticulin-targeting antigen binding domain comprises a VH comprising the amino acid sequence of SEQ ID NO: 235 and a VL comprising the amino acid sequence of SEQ ID NO: 241. In some embodiments, the calreticulin-targeting antigen binding domain comprises a VH comprising the amino acid sequence of SEQ ID NO: 236 (or an amino acid sequence having at least about 80%, 85%, 90%, 95%, or 99% sequence identity thereto) and a VL comprising the amino acid sequence of SEQ ID NO: 241 (or an amino acid sequence having at least about 80%, 85%, 90%, 95%, or 99% sequence identity thereto). In some embodiments, the calreticulin-targeting antigen binding domain comprises a VH comprising the amino acid sequence of SEQ ID NO: 236 and a VL comprising the amino acid sequence of SEQ ID NO: 241. In some embodiments, the calreticulin-targeting antigen binding domain comprises a VH comprising the amino acid sequence of SEQ ID NO: 237 (or an amino acid sequence having at least about 80%, 85%, 90%, 95%, or 99% sequence identity thereto) and a VL comprising the amino acid sequence of SEQ ID NO: 241 (or an amino acid sequence having at least about 80%, 85%, 90%, 95%, or 99% sequence identity thereto). In some embodiments, the calreticulin-targeting antigen binding domain comprises a VH comprising the amino acid sequence of SEQ ID NO: 237 and a VL comprising the amino acid sequence of SEQ ID NO: 241. In some embodiments, the calreticulin-targeting antigen binding domain comprises a VH comprising the amino acid sequence of SEQ ID NO: 6372 (or an amino acid sequence having at least about 80%, 85%, 90%, 95%, or 99% sequence identity thereto) and a VL comprising the amino acid sequence of SEQ ID NO: 242 (or an amino acid sequence having at least about 80%, 85%, 90%, 95%, or 99% sequence identity thereto). In some embodiments, the calreticulin-targeting antigen binding domain comprises a VH comprising the amino acid sequence of SEQ ID NO: 6372 and a VL comprising the amino acid sequence of SEQ ID NO: 242. In some embodiments, the calreticulin-targeting antigen binding domain comprises a VH comprising the amino acid sequence of SEQ ID NO: 234 (or an amino acid sequence having at least about 80%, 85%, 90%, 95%, or 99% sequence identity thereto) and a VL comprising the amino acid sequence of SEQ ID NO: 242 (or an amino acid sequence having at least about 80%, 85%, 90%, 95%, or 99% sequence identity thereto). In some embodiments, the calreticulin-targeting antigen binding domain comprises a VH comprising the amino acid sequence of SEQ ID NO: 234 and a VL comprising the amino acid sequence of SEQ ID NO: 242. In some embodiments, the calreticulin-targeting antigen binding domain comprises a VH comprising the amino acid sequence of SEQ ID NO: 235 (or an amino acid sequence having at least about 80%, 85%, 90%, 95%, or 99% sequence identity thereto) and a VL comprising the amino acid sequence of SEQ ID NO: 242 (or an amino acid sequence having at least about 80%, 85%, 90%, 95%, or 99% sequence identity thereto). In some embodiments, the calreticulin-targeting antigen binding domain comprises a VH comprising the amino acid sequence of SEQ ID NO: 235 and a VL comprising the amino acid sequence of SEQ ID NO: 242. In some embodiments, the calreticulin-targeting antigen binding domain comprises a VH comprising the amino acid sequence of SEQ ID NO: 236 (or an amino acid sequence having at least about 80%, 85%, 90%, 95%, or 99% sequence identity thereto) and a VL comprising the amino acid sequence of SEQ ID NO: 242 (or an amino acid sequence having at least about 80%, 85%, 90%, 95%, or 99% sequence identity thereto). In some embodiments, the calreticulin-targeting antigen binding domain comprises a VH comprising the amino acid sequence of SEQ ID NO: 236 and a VL comprising the amino acid sequence of SEQ ID NO: 242. In some embodiments, the calreticulin-targeting antigen binding domain comprises a VH comprising the amino acid sequence of SEQ ID NO: 237 (or an amino acid sequence having at least about 80%, 85%, 90%, 95%, or 99% sequence identity thereto) and a VL comprising the amino acid sequence of SEQ ID NO: 242 (or an amino acid sequence having at least about 80%, 85%, 90%, 95%, or 99% sequence identity thereto). In some embodiments, the calreticulin-targeting antigen binding domain comprises a VH comprising the amino acid sequence of SEQ ID NO: 237 and a VL comprising the amino acid sequence of SEQ ID NO: 242.

[0348] In some embodiments, the calreticulin-targeting antigen binding domain comprises a VH comprising the amino acid sequence of SEQ ID NO: 236 and a VL comprising the amino acid sequence of SEQ ID NO: 238.

TABLE 16
Exemplary variable regions of additional calreticulin-targeting antigen binding domains

| SEQ ID | | |
|---|---|---|
| NO | Description | Sequence |
| SEQ ID | BJ092 | QVQLVQSGAEVKKPGASVKVSCKASGYSFTGYYIHWVRQAPGQG |
| NO: 6372 | (VH) | LEWIGYISAYNGASSYNQKFKGRATFTVDTSTSTAYMELRSLRSDD |
| | | MAVYYCASSMDYWGQGTLVTVSS |
| SEQ ID | BJ093 | QVQLVQSGAEVKKPGASVKVSCKASGYSFTGYYIHWVRQAPGQG |
| NO: 234 | (VH) | LEWIGYISAYNGASSYNQKFKGRATFTVDTSTSTAYMELRSLRSDD |
| | | TAVYYCASSMDYWGQGTLVTVSS |
| SEQ ID | BJ094 | QVQLVQSGAEVKKPGASVKVSCKASGYSFTGYYIHWVRQAPGKG |
| NO: 235 | (VH) | LEWIGYISAYNGASSYNQKFKGRATFTVDTSTSTAYMELSSLRSED |
| | | TAVYYCASSMDYWGQGTLVTVSS |
| SEQ ID | BJ095 | QVQLVQSGAEVKKPGASVKVSCKASGYSFTGYYIHWVRQAPGQG |
| NO: 236 | (VH) | LEWIGYISAYNGASSYNQKFKGRATFTVDTSISTAYMELSRLRSDD |
| | | TAVYYCASSMDYWGQGTLVTVSS |
| SEQ ID | BJ096 | QVQLVQSGAEVKKPGASVKVSCKASGYSFTGYYIHWVRQAPGQG |
| NO: 237 | (VH) | LEWIGYISAYNGASSYNQKFKGRATFTVDTSTSTAYMELSSLRSED |
| | | TAVYYCASSMDYWGQGTLVTVSS |
| SEQ ID | VH | QVQLVQSGAEVKKPGASVKVSCKASGYSFTGYYIHWVRQAPGX₁G |
| NO: 244 | consensus | LEWIGYISAYNGASSYNQKFKGRATFTVDTSX₂STAYMELX₃X₄LRS |
| | | DDX₅AVYYCASSMDYWGQGTLVTVSS, wherein: |
| | | X₁ is Q or K, |
| | | X₂ is I or T, |
| | | X₃ is S or R, |
| | | X₄ is R or S, or |
| | | X₅ is Tor M |
| SEQ ID | BJ097 | DVVMTQSPLSLPVTLGQPASISCKSSQSLLDSDGKTYLNWLQQRPG |
| NO: 238 | (VL) | QSPKRLIYLVSKLDSGVPDRFSGSGSGTDFTLKISRVEAEDVGVYHC |
| | | WQGTHFPYTFGQGTKLEIK |
| SEQ ID | BJ098 | DVVMTQTPLSLSVTPGQPASISCKSSQSLLDSDGKTYLNWLLQKPG |
| NO: 239 | (VL) | QSPKLLIYLVSKLDSGVPDRFSGSGSGTDFTLKISRVEAEDVGVYHC |
| | | WQGTHFPYTFGQGTKLEIK |
| SEQ ID | BJ099 | DVVMTQTPLSLSVTPGQPASISCKSSQSLLDSDGKTYLNWLLQKPG |
| NO: 240 | (VL) | QPPKLLIYLVSKLDSGVPDRFSGSGSGTDFTLKISRVEAEDVGVYHC |
| | | WQGTHEPYTFGQGTKLEIK |
| SEQ ID | BJ100 | DVVMTQTPLSSPVTLGQPASISCKSSQSLLDSDGKTYLNWLQQRPG |
| NO: 241 | (VL) | QPPKLLIYLVSKLDSGVPDRFSGSGAGTDFTLKISRVEAEDVGVYH |
| | | CWQGTHEPYTFGQGTKLEIK |
| SEQ ID | BJ101 | DVVMTQSPLSLPVTPGEPASISCKSSQSLLDSDGKTYLNWLLQKPG |
| NO: 242 | (VL) | QSPKLLIYLVSKLDSGVPDRFSGSGSGTDFTLKISRVEAEDVGVYHC |
| | | WQGTHFPYTFGQGTKLEIK |
| SEQ ID | VL | DVVMTQX₁PLSX₂X₃VTX₄GX₅PASISCKSSQSLLDSDGKTYLNWLX₆ |
| NO: 245 | consensus | QX₇PGQX₈PKX₉LIYLVSKLDSGVPDRFSGSGX1₀GTDFTLKISRVEAE |
| | | DVGVYHCWQGTHEPYTFGQGTKLEIK, wherein: |
| | | X₁ is S or T, |
| | | X₂ is L or S, |
| | | X₃ is P or S, |
| | | X₄ is L or P, |
| | | X₅ is Q or E, |
| | | X₆ is Q or L, |
| | | X₇ is R or K, |
| | | X₈ is S or P, |
| | | X₉ is R or L, or |
| | | X₁₀ is S or A |

TABLE 17
Exemplary heavy chain CDRs of calreticulin-targeting antigen binding domains

| VH (SEQ ID NO) | VHCDR1 (SEQ ID NO) | VHCDR2 (SEQ ID NO) | VHCDR3 (SEQ ID NO) |
|---|---|---|---|
| BJ092 (SEQ ID | YSFTGYYIH (SEQ ID | YISAYNGASSYNQKF | SSMDY (SEQ ID NO: |
| NO: 6372) | NO: 6253) | KG (SEQ ID NO: 243) | 6255) |
| BJ093 (SEQ ID | YSFTGYYIH (SEQ ID | YISAYNGASSYNQKF | SSMDY (SEQ ID NO: |
| NO: 234) | NO: 6253) | KG (SEQ ID NO: 243) | 6255) |
| BJ094 (SEQ ID | YSFTGYYIH (SEQ ID | YISAYNGASSYNQKF | SSMDY (SEQ ID NO: |
| NO: 235) | NO: 6253) | KG (SEQ ID NO: 243) | 6255) |
| BJ095 (SEQ ID | YSFTGYYIH (SEQ ID | YISAYNGASSYNQKF | SSMDY (SEQ ID NO: |
| NO: 236) | NO: 6253) | KG (SEQ ID NO: 243) | 6255) |
| BJ096 (SEQ ID | YSFTGYYIH (SEQ ID | YISAYNGASSYNQKF | SSMDY (SEQ ID NO: |
| NO: 237) | NO: 6253) | KG (SEQ ID NO: 243) | 6255) |

TABLE 18
Exemplary light chain CDRs of calreticulin-targeting antigen binding domains

| VL (SEQ ID NO) | VLCDR1 (SEQ ID NO) | VLCDR2 (SEQ ID NO) | VLCDR3 (SEQ ID NO) |
|---|---|---|---|
| BJ097 (SEQ ID | KSSQSLLDSDGKTYLN | LVSKLDS (SEQ ID | WQGTHFPYT (SEQ |
| NO: 238) | (SEQ ID NO: 6259) | NO: 6260) | ID NO: 6261) |
| BJ098 (SEQ ID | KSSQSLLDSDGKTYLN | LVSKLDS (SEQ ID | WQGTHFPYT (SEQ |
| NO: 239) | (SEQ ID NO: 6259) | NO: 6260) | ID NO: 6261) |
| BJ099 (SEQ ID | KSSQSLLDSDGKTYLN | LVSKLDS (SEQ ID | WQGTHFPYT (SEQ |
| NO: 240) | (SEQ ID NO: 6259) | NO: 6260) | ID NO: 6261) |
| BJ100 (SEQ ID | KSSQSLLDSDGKTYLN | LVSKLDS (SEQ ID | WQGTHFPYT (SEQ |
| NO: 241) | (SEQ ID NO: 6259) | NO: 6260) | ID NO: 6261) |
| BJ101 (SEQ ID | KSSQSLLDSDGKTYLN | LVSKLDS (SEQ ID | WQGTHFPYT (SEQ |
| NO: 242) | (SEQ ID NO: 6259) | NO: 6260) | ID NO: 6261) |

TABLE 19
Exemplary calreticulin-targeting antigen binding domains

| Antibody | | | | |
|---|---|---|---|---|
| code | VH code | VH germline | VL code | VL germline |
| BJM0040 | BJ092 (SEQ | IGHV1- | BJ097 (SEQ | IGKV2- |
| | ID NO: 6372) | 18*03 | ID NO: 238) | 30*01 |
| BJM0041 | BJ093 (SEQ | IGHV1- | BJ097 (SEQ | IGKV2- |
| | ID NO: 234) | 18*01 | ID NO: 238) | 30*01 |
| BJM0042 | BJ094 (SEQ | IGHV1- | BJ097 (SEQ | IGKV2- |
| | ID NO: 235) | 2*02 | ID NO: 238) | 30*01 |
| BJM0043 | BJ095 (SEQ | IGHV1- | BJ097 (SEQ | IGKV2- |
| | ID NO: 236) | 2*02 | ID NO: 238) | 30*01 |
| BJM0044 | BJ096 (SEQ | IGHV1- | BJ097 (SEQ | IGKV2- |
| | ID NO: 237) | 2*02 | ID NO: 238) | 30*01 |
| BJM0045 | BJ092 (SEQ | IGHV1- | BJ098 (SEQ | IGKV2- |
| | ID NO: 6372) | 18*03 | ID NO: 239) | 29*02 |
| BJM0046 | BJ093 (SEQ | IGHV1- | BJ098 (SEQ | IGKV2- |
| | ID NO: 234) | 18*01 | ID NO: 239) | 29*02 |
| BJM0047 | BJ094 (SEQ | IGHV1- | BJ098 (SEQ | IGKV2- |
| | ID NO: 235) | 2*02 | ID NO: 239) | 29*02 |
| BJM0048 | BJ095 (SEQ | IGHV1- | BJ098 (SEQ | IGKV2- |
| | ID NO: 236) | 2*02 | ID NO: 239) | 29*02 |
| BJM0049 | BJ096 (SEQ | IGHV1- | BJ098 (SEQ | IGKV2- |
| | ID NO: 237) | 2*02 | ID NO: 239) | 29*02 |
| BJM0050 | BJ092 (SEQ | IGHV1- | BJ099 (SEQ | IGKV2D- |
| | ID NO: 6372) | 18*03 | ID NO: 240) | 29*01 |
| BJM0051 | BJ093 (SEQ | IGHV1- | BJ099 (SEQ | IGKV2D- |
| | ID NO: 234) | 18*01 | ID NO: 240) | 29*01 |
| BJM0052 | BJ094 (SEQ | IGHV1- | BJ099 (SEQ | IGKV2D- |
| | ID NO: 235) | 2*02 | ID NO: 240) | 29*01 |
| BJM0053 | BJ095 (SEQ | IGHV1- | BJ099 (SEQ | IGKV2D- |
| | ID NO: 236) | 2*02 | ID NO: 240) | 29*01 |
| BJM0054 | BJ096 (SEQ | IGHV1- | BJ099 (SEQ | IGKV2D- |
| | ID NO: 237) | 2*02 | ID NO: 240) | 29*01 |
| BJM0055 | BJ092 (SEQ | IGHV1- | BJ100 (SEQ | IGKV2- |
| | ID NO: 6372) | 18*03 | ID NO: 241) | 24*01 |
| BJM0056 | BJ093 (SEQ | IGHV1- | BJ100 (SEQ | IGKV2- |
| | ID NO: 234) | 18*01 | ID NO: 241) | 24*01 |
| BJM0057 | BJ094 (SEQ | IGHV1- | BJ100 (SEQ | IGKV2- |
| | ID NO: 235) | 2*02 | ID NO: 241) | 24*01 |
| BJM0058 | BJ095 (SEQ | IGHV1- | BJ100 (SEQ | IGKV2- |
| | ID NO: 236) | 2*02 | ID NO: 241) | 24*01 |
| BJM0059 | BJ096 (SEQ | IGHV1- | BJ100 (SEQ | IGKV2- |
| | ID NO: 237) | 2*02 | ID NO: 241) | 24*01 |
| BJM0060 | BJ092 (SEQ | IGHV1- | BJ101 (SEQ | IGKV2- |
| | ID NO: 6372) | 18*03 | ID NO: 242) | 28*01 |
| BJM0061 | BJ093 (SEQ | IGHV1- | BJ101 (SEQ | IGKV2- |
| | ID NO: 234) | 18*01 | ID NO: 242) | 28*01 |
| BJM0062 | BJ094 (SEQ | IGHV1- | BJ101 (SEQ | IGKV2- |
| | ID NO: 235) | 2*02 | ID NO: 242) | 28*01 |
| BJM0063 | BJ095 (SEQ | IGHV1- | BJ101 (SEQ | IGKV2- |
| | ID NO: 236) | 2*02 | ID NO: 242) | 28*01 |
| BJM0064 | BJ096 (SEQ | IGHV1- | BJ101 (SEQ | IGKV2- |
| | ID NO: 237) | 2*02 | ID NO: 242) | 28*01 |

### Immune Cell Engagers

[0349] The immune cell engagers of the multispecific or multifunctional molecules disclosed herein can mediate binding to, and/or activation of, an immune cell, e.g., an immune effector cell. In some embodiments, the immune cell is chosen from a T cell, an NK cell, a B cell, a dendritic cell, or a macrophage cell engager, or a combination thereof. In some embodiments, the immune cell engager is chosen from one, two, three, or all of a T cell engager, NK cell engager, a B cell engager, a dendritic cell engager, or a macrophage cell engager, or a combination thereof. The immune cell engager can be an agonist of the immune system. In some embodiments, the immune cell engager can be an antibody molecule, a ligand molecule (e.g., a ligand that further comprises an immunoglobulin constant region, e.g., an Fc region), a small molecule, or a nucleotide molecule.

### T Cell Engagers

[0350] The present disclosure provides, inter alia, multispecific (e.g., bi-, tri-, quad-specific) or multifunctional molecules, that are engineered to contain one or more T cell engagers that mediate binding to and/or activation of a T cell. Accordingly, in some embodiments, the T cell engager is selected from an antigen binding domain or ligand that binds to (e.g., and in some embodiments activates) one or more of the variable chain of the beta subunit of a TCR (e.g., TCRβV), CD3, TCRα, TCRβ, TCRγ, TCRξ, ICOS, CD28, CD27, HVEM, LIGHT, CD40, 4-1BB, OX40, DR3, GITR, CD30, TIM1, SLAM, CD2, or CD226. In other embodiments, the T cell engager is selected from an antigen binding domain or ligand that binds to and does not activate one or more of TCRβV, CD3, TCRα, TCRβ, TCRγ, TCRξ, ICOS, CD28, CD27, HVEM, LIGHT, CD40, 4-1BB, OX40, DR3, GITR, CD30, TIM1, SLAM, CD2, or CD226. In some embodiments, the T cell engager binds to TCRβV.

[0351] In some embodiments, the T cell engager binds to CD3 (e.g., comprises an antigen binding domain that binds to CD3). In some embodiments, the multispecific or multifunctional molecule comprises a T cell engager that binds to CD3 (e.g., comprises an antigen binding domain that binds to CD3) (e.g., comprises an antigen binding domain that binds to CD3) and a calreticulin-targeting antigen binding domain, e.g., as described herein.

[0352] In some embodiments, a multispecific or multifunctional molecule (e.g., as described herein) comprises an antigen binding domain that binds to CD3. In some embodiments, the multispecific or multifunctional molecule comprises an antigen binding domain that binds to CD3 and a calreticulin-targeting antigen binding domain, e.g., as described herein.

[0353] In some embodiments, the antigen binding domain that binds to CD3 comprises one or more CDRs (e.g., VHCDR1, VHCDR2, VHCDR3, VLCDR1, VLCDR2, and/or VLCDR3) disclosed in Table 26 and/or Table 42, or a sequence having at least 85%, 90%, 95%, or 99% identity thereto. In some embodiments, the antigen binding domain that binds to CD3 comprises one or more framework regions (e.g., VHFWR1, VHFWR2, VHFWR3, VHFWR4, VLFWR1, VLFWR2, VLFWR3, and/or VLFWR4) disclosed in Table 26 and/or Table 42, or a sequence having at least 85%, 90%, 95%, or 99% identity thereto. In some embodiments, the antigen binding domain that binds to CD3 comprises a VH and/or a VL disclosed in Table 27, or a sequence having at least 85%, 90%, 95%, or 99% identity thereto.

TABLE 26
Exemplary heavy chain CDRs and FWRs of CD3-targeting antigen binding domains

| Ab ID | VHFWR1 | VHCDR1 | VHFWR2 | VHCDR2 | VHFWR3 | VHCDR3 | VHFWR4 |
|---|---|---|---|---|---|---|---|
| BJM1210 | QVQLQQ | FTTYW | WVKQR | NFNPNN | KATLTVD | DDYGR | WGQG |
| (murine) | PGTELVK | MH | PGHGLE | GDTNY | KSSSTAY | YYFDY | TTLTV |
| | PGASVKL | (SEQ | WIG | NEKFKT | MQLSSLT | (SEQ ID | SS (SEQ |
| | SCKASGY | ID NO: | (SEQ ID | (SEQ ID | SEDSAVY | NO: | ID NO: |
| | T (SEQ ID | 7456) | NO: | NO: | YCAR | 7460) | 7461) |
| | NO: 7455) | | 7457) | 7458) | (SEQ ID | | |
| | | | | | NO: 7459) | | |
| BKM0020 | QVQLVQ | FTTYW | WVRQA | NFNPNN | RVTMTV | DDYGR | WGQG |
| (humanized) | SGAEVK | MH | PGQGLE | GDTNY | DKSTSTA | YYFDY | TLVTV |
| | KPGASVK | (SEQ | WMG | NEKFKT | YMELRSL | (SEQ ID | SS (SEQ |
| | VSCKASG | ID NO: | (SEQ ID | (SEQ ID | RSDDMA | NO: | ID NO: |
| | YT (SEQ | 7456) | NO: | NO: | VYYCAR | 7460) | 228) |
| | ID NO: | | 6027) | 7458) | (SEQ ID | | |
| | 7467) | | | | NO: 7468) | | |
| BKM0025 | QVQLVQ | FTTYW | WVRQA | NFNPNN | RVTMTV | DDYGR | WGQG |
| (humanized) | SGAEVK | MH | PGQGLE | GDINY | DKSTSTA | YYFDY | TLVTV |
| | KPGASVK | (SEQ | WMG | NEKFKT | YMELRSL | (SEQ ID | SS (SEQ |
| | VSCKASG | ID NO: | (SEQ ID | (SEQ ID | RSDDMA | NO: | ID NO: |
| | YT (SEQ | 7456) | NO: | NO: | VYYCAR | 7460) | 228) |
| | ID NO: | | 6027) | 7458) | (SEQ ID | | |
| | 7467) | | | | NO: 7468) | | |
| BKM0028 | QVQLVQ | FTTYW | WVRQA | NFNPNN | RVTMTV | DDYGR | WGQG |
| (humanized) | SGAEVK | MH | PGKGLE | GDTNY | DKSTSTA | YYFDY | TLVTV |
| | KPGASVK | (SEQ | WMG | NEKFKT | YMELSSL | (SEQ ID | SS (SEQ |
| | VSCKASG | ID NO: | (SEQ ID | (SEQ ID | RSEDTAV | NO: | ID NO: |
| | YT (SEQ | 7456) | NO: | NO: | YYCAR | 7460) | 228) |
| | ID NO: | | 7473) | 7458) | (SEQ ID | | |
| | 7467) | | | | NO: 7474) | | |
| BKM0038 | QVQLVQ | FTTYW | WVRQA | NFNPNN | RVTMTV | DDYGR | WGQG |
| (humanized) | SGAEVK | MH | PGKGLE | GDTNY | DKSTSTA | YYFDY | TLVTV |
| | KPGASVK | (SEQ | WMG | NEKFKT | YMELSSL | (SEQ ID | SS (SEQ |
| | VSCKASG | ID NO: | (SEQ ID | (SEQ ID | RSEDTAV | NO: | ID NO: |
| | YT (SEQ | 7456) | NO: | NO: | YYCAR | 7460) | 228) |
| | ID NO: | | 7473) | 7458) | (SEQ ID | | |
| | 7467) | | | | NO: 7474) | | |

TABLE 42
Exemplary light chain CDRs and FWRs of CD3-targeting antigen binding domains

| Ab ID | VLFWR1 | VLCDR1 | VLFWR2 | VLCDR2 | VLFWR3 | VLCDR3 | VLFWR4 |
|---|---|---|---|---|---|---|---|
| BJM1210 | DIVMSQS | KSSQSL | WYQQ | WAFTR | GVPDRFT | KQSFIL | FGGGT |
| (murine) | PSSLAVS | LNSRTR | KPGQA | ES (SEQ | GSGSGTD | RT (SEQ | KLEIK |
| | AGEKVT | KNYLA | PKLLIY | ID NO: | FTLTISSV | ID NO: | (SEQ ID |
| | MSC (SEQ | (SEQ ID | (SEQ ID | 7464) | QAEDLAI | 7466) | NO: |
| | ID NO: | NO: | NO: | | YYC (SEQ | | 6284) |
| | 7462) | 7463) | 7433) | | ID NO: | | |
| | | | | | 7465) | | |
| BKM0020 | DIOMTQS | KSSQSL | WYQQ | WAFTR | GVPSRFSG | KQSFIL | FGGGT |
| (humanized) | PSTLSAS | LNSRTR | KPGKA | ES (SEQ | SGSGTEFT | RT (SEQ | KVEIK |
| | VGDRVTI | KNYLA | PKLLIY | ID NO: | LTISSLQP | ID NO: | (SEQ ID |
| | TC (SEQ | (SEQ ID | (SEQ ID | 7464) | DDFATYY | 7466) | NO: |
| | ID NO: | NO: | NO: | | C (SEQ ID | | 233) |
| | 6093) | 7463) | 280) | | NO: 7469) | | |
| BKM0025 | EIVMTQS | KSSQSL | WYQQ | WAFTR | GIPDRFSG | KQSFIL | FGGGT |
| (humanized) | PATLSLS | LNSRTR | KPGLA | ES (SEQ | SGSGTDFT | RT (SEQ | KVEIK |
| | PGERATL | KNYLA | PRLLIY | ID NO: | LTISRLEP | ID NO: | (SEQ ID |
| | SC (SEQ | (SEQ ID | (SEQ ID | 7464) | EDFAVYY | 7466) | NO: |
| | ID NO: | NO: | NO: | | C (SEQ ID | | 233) |
| | 7470) | 7463) | 7471) | | NO: 7472) | | |
| BKM0028 | EIVMTQS | KSSQSL | WYQQ | WAFTR | GIPDRESG | KQSFIL | FGGGT |
| (humanized) | PATLSLS | LNSRTR | KPGLA | ES (SEQ | SGSGTDFT | RT (SEQ | KVEIK |
| | PGERATL | KNYLA | PRLLIY | ID NO: | LTISRLEP | ID NO: | (SEQ ID |
| | SC (SEQ | (SEQ ID | (SEQ ID | 7464) | EDFAVYY | 7466) | NO: |
| | ID NO: | NO: | NO: | | C (SEQ ID | | 233) |
| | 7470) | 7463) | 7471) | | NO: 7472) | | |
| BKM0038 | DIQMTQS | KSSQSL | WYQQ | WAFTR | GVPSRFSG | KQSFIL | FGGGT |
| (humanized) | PSSLSAS | LNSRTR | KPGKA | ES (SEQ | SGSGTDFT | RT (SEQ | KVEIK |
| | VGDRVTI | KNYLA | PKLLIY | ID NO: | LTISSLQP | ID NO: | (SEQ ID |
| | TC (SEQ | (SEQ ID | (SEQ ID | 7464) | EDFATYY | 7466) | NO: |
| | ID NO: | NO: | NO: | | C (SEQ ID | | 233) |
| | 7475) | 7463) | 280) | | NO: 7476) | | |

TABLE 27
Exemplary variable regions of CD3-targeting antigen binding domains

| SEQ | | |
|---|---|---|
| ID NO | Ab ID | Sequence |
| 7477 | BJM1210 | QVQLQQPGTELVKPGASVKLSCKASGYTFTTYWMHWVKQRPGH |
| | (murine) VH | GLEWIGNFNPNNGDTNYNEKFKTKATLTVDKSSSTAYMQLSSLTS |
| | | EDSAVYYCARDDYGRYYFDYWGQGTTLTVSS |
| 7478 | BKM0020 | QVQLVQSGAEVKKPGASVKVSCKASGYTFTTYWMHWVRQAPGQ |
| | (humanized) | GLEWMGNFNPNNGDTNYNEKFKTRVTMTVDKSTSTAYMELRSL |
| | VH | RSDDMAVYYCARDDYGRYYFDYWGQGTLVTVSS |
| 7478 | BKM0025 | QVQLVQSGAEVKKPGASVKVSCKASGYTFTTYWMHWVRQAPGQ |
| | (humanized) | GLEWMGNFNPNNGDTNYNEKFKTRVTMTVDKSTSTAYMELRSL |
| | VH | RSDDMAVYYCARDDYGRYYFDYWGQGTLVTVSS |
| 7479 | BKM0028 | QVQLVQSGAEVKKPGASVKVSCKASGYTFTTYWMHWVRQAPGK |
| | (humanized) | GLEWMGNFNPNNGDTNYNEKFKTRVTMTVDKSTSTAYMELSSLR |
| | VH | SEDTAVYYCARDDYGRYYFDYWGQGTLVTVSS |
| 7479 | BKM0038 | QVQLVQSGAEVKKPGASVKVSCKASGYTFTTYWMHWVRQAPGK |
| | (humanized) | GLEWMGNFNPNNGDTNYNEKFKTRVTMTVDKSTSTAYMELSSLR |
| | VH | SEDTAVYYCARDDYGRYYFDYWGQGTLVTVSS |
| 7480 | BJM1210 | DIVMSQSPSSLAVSAGEKVTMSCKSSQSLLNSRTRKNYLAWYQQK |
| | (murine) VL | PGQAPKLLIYWAFTRESGVPDRFTGSGSGTDFTLTISSVQAEDLAIY |
| | | YCKQSFILRTFGGGTKLEIK |
| 7481 | BKM0020 | DIQMTQSPSTLSASVGDRVTITCKSSQSLLNSRTRKNYLAWYQQK |
| | (humanized) | PGKAPKLLIYWAFTRESGVPSRFSGSGSGTEFTLTISSLQPDDFATY |
| | VL | YCKQSFILRTFGGGTKVEIK |
| 7482 | BKM0025 | EIVMTQSPATLSLSPGERATLSCKSSQSLLNSRTRKNYLAWYQQKP |
| | (humanized) | GLAPRLLIYWAFTRESGIPDRFSGSGSGTDFTLTISRLEPEDFAVYY |
| | VL | CKQSFILRTFGGGTKVEIK |
| 7482 | BKM0028 | EIVMTQSPATLSLSPGERATLSCKSSQSLLNSRTRKNYLAWYQQKP |
| | (humanized) | GLAPRLLIYWAFTRESGIPDRFSGSGSGTDFTLTISRLEPEDFAVYY |
| | VL | CKQSFILRTFGGGTKVEIK |
| 7483 | BKM0038 | DIQMTQSPSSLSASVGDRVTITCKSSQSLLNSRTRKNYLAWYQQKP |
| | (humanized) | GKAPKLLIYWAFTRESGVPSRFSGSGSGTDFTLTISSLQPEDFATYY |
| | VL | CKQSFILRTFGGGTKVEIK |

[0354] In some embodiments, the multifunctional molecule (e.g., an scFv, e.g., a bispecific scFv) comprises the amino acid sequence (or a CDR, VH, or VL sequence comprised therein) below, or an amino acid sequence having at least 85%, 90%, 95%, or 99% identity thereto:

(SEQ ID NO: 7452)
EVQLVESGGGLVQPGKSLKLSCEASGFTFSGYGMHWVRQAPGRGLESVA
YITSSSINIKYADAVKGRFTVSRDNAKNLLFLQMNILKSEDTAMYYCAR
FDWDKNYWGQGTMVTVSSGGGGSGGGGSGGGGSGGGGSDIQMTQSPSSL
PASLGDRVTINCQASQDISNYLNWYQQKPGKAPKLLIYYTNKLADGVPS
RFSGSGSGRDSSFTISSLESEDIGSYYCQQYYNYPWTFGPGTKLEIKGG
GGSTIKPCPPCKCPAPNAAGGPSVFIFPPKIKDVLMISLSPIVTCVVVD
VSEDDPDVQISWFVNNVEVHTAQTQTHREDYNSTLRVVSALPIQHQDWM
SGKEFKCKVNNKDLGAPIERTISKPKGSVRAPQVCVLPPPEEEMTKKQV
TLSCAVTDFMPEDIYVEWTNNGKTELNYKNTEPVLDSDGSYFMVSKLRV
EKKNWVERNSYSCSVVHEGLHNHHTTKSFSRTPGK.

[0355] In some embodiments, the multifunctional molecule (e.g., a bispecific antibody molecule) comprises the amino acid sequence (or a CDR (underlined), VH, or constant region sequence comprised therein), below, or an amino acid sequence having at least 85%, 90%, 95%, or 99% identity thereto:

(SEQ ID NO: 7484)
EVQLVESGGGLVQPGGSLRLSCAASGFTFSEYWMNWLRQAPGKGLEWVG
VIKYKYSNYATEFAESVKGRFTISRDDSKSSVYLQMNSLKTEDTAVYYC
ARGRDVQDYWGQGTMVTVSSASTKGPSVFPLAPSSKSTSGGTAALGCLV
KDYFPEPVTVSWNSGALTSGVHTFPAVLQSSGLYSLSSVVTVPSSSLGT
QTYICNVNHKPSNTKVDKRVEPKSCDKTHTCPPCPAPELLGGPSVFLFP
PKPKDTLMISRTPEVTCVVVDVSHEDPEVKFNWYVDGVEVHNAKTKPRE
EQYASTYRVVSVLTVLHQDWLNGKEYKCKVSNKALPAPIEKTISKAKGQ
PREPQVYTLPPCREEMTKNQVSLWCLVKGFYPSDIAVEWESNGQPENNY
KTTPPVLDSDGSFFLYSKLTVDKSRWQQGNVFSCSVMHEALHNHYTQKS
LSLSPGK

[0356] In some embodiments, the multifunctional molecule (e.g., a bispecific antibody molecule) comprises the amino acid sequence (or a CDR (underlined), VL, or constant region sequence comprised therein), below, or an amino acid sequence having at least 85%, 90%, 95%, or 99% identity thereto:

(SEQ ID NO: 7485)
DIQLTQSPSFLSASVGDRVTITCSTSSSVTTNYLHWYQQKPGKAPKLLI
YSTSNLASGVPSRFSGSGSGTEYTLTISSLQPEDFATYYCQQCLSSPCT
FGQGTKLEIKRTVAAPSVFIFPPSDEQLKSGTASVVCLLNNFYPREAKV
QWKVDNALQSGNSQESVTEQDSKDSTYSLSSTLTLSKADYEKHKVYACE
VTHQGLSSPVTKSFNRGEC

[0357] In some embodiments, the multifunctional molecule (e.g., an scFv, e.g., a bispecific scFv) comprises the amino acid sequence (or a CDR (underlined), VH, or VL sequence comprised therein), below, or an amino acid sequence having at least 85%, 90%, 95%, or 99% identity thereto:

(SEQ ID NO: 7486)
QVQLVQSGAEVKKPGASVKVSCKASGYTFTTYWMHWVRQAPGQGLEWMG
NFNPNNGDTNYNEKFKTRVTMTVDKSTSTAYMELRSLRSDDMAVYYCAR
DDYGRYYFDYWGQGTLVTVSSGGGGSGGGGSGGGGSGGGGSDIQMTQSP
STLSASVGDRVTITCKSSQSLLNSRTRKNYLAWYQQKPGKAPKLLIYWA
FTRESGVPSRFSGSGSGTEFTLTISSLQPDDFATYYCKQSFILRTFGGG
TKVEIKDKTHTCPPCPAPELLGGPSVFLFPPKPKDTLMISRTPEVTCVV
VDVSHEDPEVKFNWYVDGVEVHNAKTKPREEQYASTYRVVSVLTVLHQD
WLNGKEYKCKVSNKALPAPIEKTISKAKGQPREPQVCTLPPSREEMTKN
QVSLSCAVKGFYPSDIAVEWESNGQPENNYKTTPPVLDSDGSFFLVSKL
TVDKSRWQQGNVFSCSVMHEALHNHYTQKSLSLSPGK

### Human T Cell Receptor (TCR) Complex

[0358] T cell receptors (TCR) can be found on the surface of T cells. TCRs recognize antigens, e.g., peptides, presented on, e.g., bound to, major histocompatibility complex (MHC) molecules on the surface of cells, e.g., antigen-presenting cells. TCRs are heterodimeric molecules and can comprise an alpha chain, a beta chain, a gamma chain or a delta chain. TCRs comprising an alpha chain and a beta chain are also referred to as TCRαβ. The TCR beta chain consists of the following regions (also known as segments): variable (V), diversity (D), joining (J) and constant (C) (see Mayer G. and Nyland J. (2010) Chapter 10: Major Histocompatibility Complex and T-cell Receptors-Role in Immune Responses. In: Microbiology and Immunology on-line, University of South Carolina School of Medicine). The TCR alpha chain consists of V, J and C regions. The rearrangement of the T-cell receptor (TCR) through somatic recombination of V (variable), D (diversity), J (joining), and C (constant) regions is a defining event in the development and maturation of a T cell. TCR gene rearrangement takes place in the thymus.

[0359] TCRs can comprise a receptor complex, known as the TCR complex, which comprises a TCR heterodimer comprising of an alpha chain and a beta chain, and dimeric signaling molecules, e.g., CD3 co-receptors, e.g., CD3δ/ε, and/or CD3γ/ε.

### TCR Beta V (TCRBV)

[0360] Diversity in the immune system enables protection against a huge array of pathogens. Since the germline genome is limited in size, diversity is achieved not only by the process of V(D)J recombination but also by junctional (junctions between V-D and D-J segments) deletion of nucleotides and addition of pseudo-random, non-templated nucleotides. The TCR beta gene undergoes gene arrangement to generate diversity.

[0361] The TCR V beta repertoire varies between individuals and populations because of, e.g., 7 frequently occurring inactivating polymorphisms in functional gene segments and a large insertion/deletion-related polymorphism encompassing 2 V beta gene segments.

[0362] This disclosure provides, inter alia, antibody molecules and fragments thereof, that bind, e.g., specifically bind, to a human TCR beta V chain (TCRβV), e.g., a TCRβV gene family (also referred to as a group), e.g., a TCRβV subfamily (also referred to as a subgroup), e.g., as described herein. TCR beta V families and subfamilies are known in the art, e.g., as described in Yassai et al., (2009) Immunogenetics 61(7)pp:493-502; Wei S. and Concannon P. (1994) Human Immunology 41(3) pp: 201-206. The antibodies described herein can be recombinant antibodies, e.g., recombinant non-murine antibodies, e.g., recombinant human or humanized antibodies.

[0363] In an aspect, the disclosure provides an anti-TCRβV antibody molecule that binds to human TCRβV, e.g., a TCRβV family, e.g., gene family or a variant thereof. In some embodiments a TCRBV gene family comprises one or more subfamilies, e.g., as described herein, e.g., in FIG. 3, Table 28 or Table 29. In some embodiments, the TCRβV gene family comprises: a TCRβ V6 subfamily, a TCRβ V10 subfamily, a TCRβ V12 subfamily, a TCRβ V5 subfamily, a TCRβ V7 subfamily, a TCRβ V11 subfamily, a TCRβ V14 subfamily, a TCRβ V16 subfamily, a TCRβ V18 subfamily, a TCRβ V9 subfamily, a TCRβ V13 subfamily, a TCRβ V4 subfamily, a TCRβ V3 subfamily, a TCRβ V2 subfamily, a TCRβ V15 subfamily, a TCRβ V30 subfamily, a TCRβ V19 subfamily, a TCRβ V27 subfamily, a TCRβ V28 subfamily, a TCRβ V24 subfamily, a TCRβ V20 subfamily, TCRβ V25 subfamily, a TCRβ V29 subfamily, a TCRβ V1 subfamily, a TCRβ V17 subfamily, a TCRβ V21 subfamily, a TCRβ V23 subfamily, or a TCRβ V26 subfamily.

[0364] In some embodiments, TCRβ V6 subfamily is also known as TCRβ V13.1. In some embodiments, the TCRβ V6 subfamily comprises: TCRβ V6-4*01, TCRβ V6-4*02, TCRβ V6-9*01, TCRβ V6-8*01, TCRβ V6-5*01, TCRβ V6-6*02, TCRβ V6-6*01, TCRβ V6-2*01, TCRβ V6-3*01 or TCRβ V6-1*01, or a variant thereof. In some embodiments, TCRβ V6 comprises TCRβ V6-4*01, or a variant thereof. In some embodiments, TCRβ V6 comprises TCRβ V6-4*02, or a variant thereof. In some embodiments, TCRβ V6 comprises TCRβ V6-9*01, or a variant thereof. In some embodiments, TCRβ V6 comprises TCRβ V6-8*01, or a variant thereof. In some embodiments, TCRβ V6 comprises TCRβ V6-5*01, or a variant thereof. In some embodiments, TCRβ V6 comprises TCRβ V6-6*02, or a variant thereof. In some embodiments, TCRβ V6 comprises TCRβ V6-6*01, or a variant thereof. In some embodiments, TCRβ V6 comprises TCRβ V6-2*01, or a variant thereof. In some embodiments, TCRβ V6 comprises TCRβ V6-3*01, or a variant thereof. In some embodiments, TCRβ V6 comprises TCRβ V6-1*01, or a variant thereof.

[0365] In some embodiments, TCRβ V6 comprises TCRβ V6-5*01, or a variant thereof. In some embodiments, TCRβ V6, e.g., TCRβ V6-5*01, is recognized, e.g., bound, by SEQ ID NO: 1 and/or SEQ ID NO: 2. In some embodiments, TCRβ V6, e.g., TCRβ V6-5*01, is recognized, e.g., bound, by SEQ ID NO: 9 and/or SEQ ID NO: 10. In some embodiments, TCRβ V6 is recognized, e.g., bound, by SEQ ID NO: 9 and/or SEQ ID NO: 11.

[0366] In some embodiments, TCRβ V10 subfamily is also known as TCRβ V12. In some embodiments, the TCRβ V10 subfamily comprises: TCRβ V10-1*01, TCRβ V10-1*02, TCRβ V10-3*01 or TCRβ V10-2*01, or a variant thereof.

[0367] In some embodiments, TCRβ V12 subfamily is also known as TCRβ V8.1. In some embodiments, the TCRβ V12 subfamily comprises: TCRβ V12-4*01, TCRβ V12-3*01, or TCRβ V12-5*01, or a variant thereof. In some embodiments, TCRβ V12 is recognized, e.g., bound, by SEQ ID NO: 15 and/or SEQ ID NO: 16. In some embodiments, TCRβ V12 is recognized, e.g., bound, by any one of SEQ ID NOs 23-25, and/or any one of SEQ ID NO: 26-30:

[0368] In some embodiments, the TCRβ V5 subfamily is chosen from: TCRβ V5-5*01, TCRβ V5-6*01, TCRβ V5-4*01, TCRβ V5-8*01, TCRβ V5-1*01, or a variant thereof.

[0369] In some embodiments, the TCRβ V7 subfamily comprises TCRβ V7-7*01, TCRβ V7-6*01, TCRβ V7-8*02, TCRβ V7-4*01, TCRβ V7-2*02, TCRβ V7-2*03, TCRβ V7-2*01, TCRβ V7-3*01, TCRβ V7-9*03, or TCRβ V7-9*01, or a variant thereof.

[0370] In some embodiments, the TCRβ V11 subfamily comprises: TCRβ V11-1*01, TCRβ V11-2*01 or TCRβ V11-3*01, or a variant thereof.

[0371] In some embodiments, the TCRβ V14 subfamily comprises TCRβ V14*01, or a variant thereof.

[0372] In some embodiments, the TCRβ V16 subfamily comprises TCRβ V16*01, or a variant thereof.

[0373] In some embodiments, the TCRβ V18 subfamily comprises TCRβ V18*01, or a variant thereof.

[0374] In some embodiments, the TCRβ V9 subfamily comprises TCRβ V9*01 or TCRβ V9*02, or a variant thereof.

[0375] In some embodiments, the TCRβ V13 subfamily comprises TCRβ V13*01, or a variant thereof.

[0376] In some embodiments, the TCRβ V4 subfamily comprises TCRβ V4-2*01, TCRβ V4-3*01, or TCRβ V4-1*01, or a variant thereof.

[0377] In some embodiments, the TCRβ V3 subfamily comprises TCRβ V3-1*01, or a variant thereof.

[0378] In some embodiments, the TCRβ V2 subfamily comprises TCRβ V2*01, or a variant thereof.

[0379] In some embodiments, the TCRβ V15 subfamily comprises TCRβ V15*01, or a variant thereof.

[0380] In some embodiments, the TCRβ V30 subfamily comprises TCRβ V30*01, or TCRβ V30*02, or a variant thereof.

[0381] In some embodiments, the TCRβ V19 subfamily comprises TCRβ V19*01, or TCRβ V19*02, or a variant thereof.

[0382] In some embodiments, the TCRβ V27 subfamily comprises TCRβ V27*01, or a variant thereof.

[0383] In some embodiments, the TCRβ V28 subfamily comprises TCRβ V28*01, or a variant thereof.

[0384] In some embodiments, the TCRβ V24 subfamily comprises TCRβ V24-1*01, or a variant thereof.

[0385] In some embodiments, the TCRβ V20 subfamily comprises TCRβ V20-1*01, or TCRβ V20-1*02, or a variant thereof.

[0386] In some embodiments, the TCRβ V25 subfamily comprises TCRβ V25-1*01, or a variant thereof.

[0387] In some embodiments, the TCRβ V29 subfamily comprises TCRβ V29-1*01, or a variant thereof.

TABLE 28
List of TCRβV subfamilies and subfamily members

| Reference | | |
|---|---|---|
| in FIG. 3 | Subfamily | Subfamily members |
| A | TCRβ V6 | TCRβ V6-4*01, TCRβ V6-4*02, TCRβ V6-9*01, TCRβ V6- |
| | Also referred to as: | 8*01, TCRβ V6-5*01, TCRβ V6-6*02, TCRβ V6-6*01, |
| | TCR Vβ 13.1 | TCRβ V6-2*01, TCRβ V6-3*01 or TCRβ V6-1*01. |
| B | TCRβ V10 | TCRβ V10-1*01, TCRβ V10-1*02, TCRβ V10-3*01 or |
| | Also referred to as: | TCRβ V10-2*01 |
| | TCRB V12 | |
| C | TCRβ V12 | TCRβ V12-4*01, TCRβ V12-3*01, or TCRβ V12-5*01 |
| | Also referred to as: | |
| | TCRβ V8.1 | |
| D | TCRβ V5 | TCRβ V5-5*01, TCRβ V5-6*01, TCRβ V5-4*01, TCRβ V5- |
| | | 8*01, TCRβ V5-1*01 |
| E | TCRβ V7 | TCRβ V7-7*01, TCRβ V7-6*01, TCRβ V7 -8*02, TCRβ V7- |
| | | 4*01, TCRβ V7-2*02, TCRβ V7-2*03, TCRβ V7-2*01, |
| | | TCRβ V7-3*01, TCRβ V7-9*03, or TCRβ V7-9*01 |
| F | TCRβ V11 | TCRβ V11-1*01, TCRβ V11-2*01 or TCRβ V11-3*01 |
| G | TCRβ V14 | TCRβ V14*01 |
| H | TCRβ V16 | TCRβ V16*01 |
| I | TCRβ V18 | TCRβ V18*01 |
| J | TCRβ V9 | TCRβ V9*01 or TCRβ V9*02 |
| K | TCRβ V13 | TCRβ V13*01 |
| L | TCRβ V4 | TCRβ V4-2*01, TCRβ V4-3*01, or TCRβ V4-1*01 |
| M | TCRβ V3 | TCRβ V3-1*01 |
| N | TCRβ V2 | TCRβ V2*01 |
| O | TCRβ V15 | TCRβ V15*01 |
| P | TCRβ V30 | TCRβ V30*01, or TCRβ V30*02 |
| Q | TCRβ V19 | TCRβ V19*01, or TCRβ V19*02 |
| R | TCRβ V27 | TCRβ V27*01. |
| S | TCRβ V28 | TCRβ V28*01. |
| T | TCRβ V24 | TCRβ V24-1*01 |
| U | TCRβ V20 | TCRβ V20-1*01, or TCRβ V20-1*02 |
| V | TCRβ V25 | TCRβ V25-1*01 |
| W | TCRβ V29 | TCRβ V29-1*01 |

TABLE 29
Additional TCRβV subfamilies

Subfamily
TCRβ V1
TCRβ V17
TCRβ V21
TCRβ V23
TCRβ V26

### Anti-TCRβV Antibodies

[0388] Disclosed herein, is the discovery of a novel class of antibodies, i.e. anti-TCRβV antibody molecules disclosed herein, which despite having low sequence similarity (e.g., low sequence identity among the different antibody molecules that recognize different TCRβV subfamilies), recognize a structurally conserved region, e.g., domain, on the TCRβV protein and have a similar function (e.g., a similar cytokine profile). Thus, the anti-TCRβV antibody molecules disclosed herein share a structure-function relationship.

[0389] In some embodiments, the anti-TCRβV antibody molecules disclosed herein do not recognize, e.g., bind to, an interface of a TCRβV:TCRalpha complex.

[0390] In some embodiments, the anti-TCRβV antibody molecules disclosed herein do not recognize, e.g., bind to, a constant region of a TCRβV protein. An exemplary antibody that binds to a constant region of a TCRβV region is JOVI.1 as described in Viney et al., (Hybridoma. 1992 December; 11(6):701-13).

[0391] In some embodiments, the anti-TCRβV antibody molecules disclosed herein do not recognize, e.g., bind to, one or more (e.g., all) of a complementarity determining region (e.g., CDR1, CDR2 and/or CDR3) of a TCRβV protein.

[0392] In some embodiments, the anti-TCRβV antibody molecules disclosed herein binds (e.g., specifically binds) to a TCRβV region. In some embodiments, binding of anti-TCRβV antibody molecules disclosed herein results in a cytokine profile that differs from a cytokine profile of a T cell engager that binds to a receptor or molecule other than a TCRβV region (“a non-TCRβV-binding T cell engager”). In some embodiments, the non-TCRβV-binding T cell engager comprises an antibody that binds to a CD3 molecule (e.g., CD3 epsilon (CD3e) molecule); or a TCR alpha (TCRα) molecule. In some embodiments, the non-TCRβV-binding T cell engager is an OKT3 antibody or an SP34-2 antibody.

[0393] In an aspect, the disclosure provides an anti-TCRβV antibody molecule that binds to human TCRβV, e.g., a TCRβV gene family, e.g., one or more of a TCRβV subfamily, e.g., as described herein, e.g., in FIG. 3, Table 28, or Table 29. In some embodiments, the anti-TCRβV antibody molecule binds to one or more TCRβV subfamilies chosen from: a TCRβ V6 subfamily, a TCRβ V10 subfamily, a TCRβ V12 subfamily, a TCRβ V5 subfamily, a TCRβ V7 subfamily, a TCRβ V11 subfamily, a TCRβ V14 subfamily, a TCRβ V16 subfamily, a TCRβ V18 subfamily, a TCRβ V9 subfamily, a TCR P V13 subfamily, a TCRβ V4 subfamily, a TCRβ V3 subfamily, a TCRβ V2 subfamily, a TCRβ V15 subfamily, a TCRβ V30 subfamily, a TCRβ V19 subfamily, a TCRβ V27 subfamily, a TCRβ V28 subfamily, a TCRβ V24 subfamily, a TCRβ V20 subfamily, TCRβ V25 subfamily, a TCRβ V29 subfamily, a TCRβ V1 subfamily, a TCRβ V17 subfamily, a TCRβ V21 subfamily, a TCRβ V23 subfamily, or a TCRβ V26 subfamily, or a variant thereof.

[0394] In some embodiments, the anti-TCRβV antibody molecule binds to a TCRβ V6 subfamily comprising: TCRβ V6-4*01, TCRβ V6-4*02, TCRβ V6-9*01, TCRβ V6-8*01, TCRβ V6-5*01, TCRβ V6-6*02, TCRβ V6-6*01, TCRβ V6-2*01, TCRβ V6-3*01 or TCRβ V6-1*01, or a variant thereof. In some embodiments the TCRβ V6 subfamily comprises TCRβ V6-5*01, or a variant thereof. In some embodiments, TCRβ V6 comprises TCRβ V6-4*01, or a variant thereof. In some embodiments, TCRβ V6 comprises TCRβ V6-4*02, or a variant thereof. In some embodiments, TCRβ V6 comprises TCRβ V6-9*01, or a variant thereof. In some embodiments, TCRβ V6 comprises TCRβ V6-8*01, or a variant thereof. In some embodiments, TCRβ V6 comprises TCRβ V6-5*01, or a variant thereof. In some embodiments, TCRβ V6 comprises TCRβ V6-6*02, or a variant thereof. In some embodiments, TCRβ V6 comprises TCRβ V6-6*01, or a variant thereof. In some embodiments, TCRβ V6 comprises TCRβ V6-2*01, or a variant thereof. In some embodiments, TCRβ V6 comprises TCRβ V6-3*01, or a variant thereof. In some embodiments, TCRβ V6 comprises TCRβ V6-1*01, or a variant thereof.

[0395] In some embodiments, the anti-TCRβV antibody molecule binds to a TCRβ V10 subfamily comprising: TCRβ V10-1*01, TCRβ V10-1*02, TCRβ V10-3*01 or TCRβ V10-2*01, or a variant thereof.

[0396] In some embodiments, the anti-TCRβV antibody molecule binds to a TCRβ V12 subfamily comprising: TCRβ V12-4*01, TCRβ V12-3*01 or TCRβ V12-5*01, or a variant thereof.

[0397] In some embodiments, the anti-TCRβV antibody molecule binds to a TCRβ V5 subfamily comprising: TCRβ V5-5*01, TCRβ V5-6*01, TCRβ V5-4*01, TCRβ V5-8*01, TCRβ V5-1*01, or a variant thereof.

[0398] In some embodiments, the anti-TCRβV antibody molecule does not bind to TCRβ V12, or binds to TCRβ V12 with an affinity and/or binding specificity that is less than (e.g., less than about 10%, 20%, 30%, 40%, 50%, 60%, 70%, 80%, 90% or about 2-, 5-, or 10-fold) the affinity and/or binding specificity of the 16G8 murine antibody or a humanized version thereof as described in U.S. Pat. No. 5,861,155.

[0399] In some embodiments, the anti-TCRβV antibody molecule binds to TCRβ V12 with an affinity and/or binding specificity that is greater than (e.g., greater than about 10%, 20%, 30%, 40%, 50%, 60%, 70%, 80%, 90% or about 2-, 5-, or 10-fold) the affinity and/or binding specificity of the 16G8 murine antibody or a humanized version thereof as described in U.S. Pat. No. 5,861,155.

[0400] In some embodiments, the anti-TCRβV antibody molecule binds to a TCRβV region other than TCRβ V12 (e.g., TCRβV region as described herein, e.g., TCRβ V6 subfamily (e.g., TCRβ V6-5*01) with an affinity and/or binding specificity that is greater than (e.g., greater than about 10%, 20%, 30%, 40%, 50%, 60%, 70%, 80%, 90% or about 2-, 5-, or 10-fold) the affinity and/or binding specificity of the 16G8 murine antibody or a humanized version thereof as described in U.S. Pat. No. 5,861,155.

[0401] In some embodiments, the anti-TCRβV antibody molecule does not bind to TCRβ V5-5*01 or TCRβ V5-1*01, or binds to TCRβ V5-5*01 or TCRβ V5-1*01 with an affinity and/or binding specificity that is less than (e.g., less than about 10%, 20%, 30%, 40%, 50%, 60%, 70%, 80%, 90% or about 2-, 5-, or 10-fold) the affinity and/or binding specificity of the TM23 murine antibody or a humanized version thereof as described in U.S. Pat. No. 5,861,155.

[0402] In some embodiments, the anti-TCRβV antibody molecule binds to TCRβ V5-5*01 or TCRβ V5-1*01 with an affinity and/or binding specificity that is greater than (e.g., greater than about 10%, 20%, 30%, 40%, 50%, 60%, 70%, 80%, 90% or about 2-, 5-, or 10-fold) the affinity and/or binding specificity of the TM23 murine antibody or a humanized version thereof as described in U.S. Pat. No. 5,861,155.

[0403] In some embodiments, the anti-TCRβV antibody molecule binds to a TCRβV region other than TCRβ V5-5*01 or TCRβ V5-1*01 (e.g., TCRβV region as described herein, e.g., TCR P V6 subfamily (e.g., TCRβ V6-5*01) with an affinity and/or binding specificity that is greater than (e.g., greater than about 10%, 20%, 30%, 40%, 50%, 60%, 70%, 80%, 90% or about 2-, 5-, or 10-fold) the affinity and/or binding specificity of the TM23 murine antibody or a humanized version thereof as described in U.S. Pat. No. 5,861,155.

### Anti-TCRβ V6 Antibodies

[0404] Accordingly, in one aspect, the disclosure provides an anti-TCRβV antibody molecule that binds to human TCRβ V6, e.g., a TCRβ V6 subfamily comprising: TCRβ V6-4*01, TCRβ V6-4*02, TCRβ V6-9*01, TCRβ V6-8*01, TCRβ V6-5*01, TCRβ V6-6*02, TCRβ V6-6*01, TCRβ V6-2*01, TCRβ V6-3*01 or TCRβ V6-1*01. In some embodiments the TCRβ V6 subfamily comprises TCRβ V6-5*01 or a variant thereof. In some embodiments, TCRβ V6 comprises TCRβ V6-4*01, or a variant thereof. In some embodiments, TCRβ V6 comprises TCRβ V6-4*02, or a variant thereof. In some embodiments, TCRβ V6 comprises TCRβ V6-9*01, or a variant thereof. In some embodiments, TCRβ V6 comprises TCRβ V6-8*01, or a variant thereof. In some embodiments, TCRβ V6 comprises TCRβ V6-5*01, or a variant thereof. In some embodiments, TCRβ V6 comprises TCRβ V6-6*02, or a variant thereof. In some embodiments, TCRβ V6 comprises TCRβ V6-6*01, or a variant thereof. In some embodiments, TCRβ V6 comprises TCRβ V6-2*01, or a variant thereof. In some embodiments, TCRβ V6 comprises TCRβ V6-3*01, or a variant thereof. In some embodiments, TCRβ V6 comprises TCRβ V6-1*01, or a variant thereof.

[0405] In some embodiments, TCRβ V6-5*01 is encoded by the nucleic acid sequence of SEQ ID NO: 43, or a sequence having 85%, 90%, 95%, 99% or more identity thereof.

SEQ ID NO: 43
ATGAGCATCGGCCTCCTGTGCTGTGCAGCCTTGTCTCTCCTGTGGGCAG
GTCCAGTGAATGCTGGTGTCACTCAGACCCCAAAATTCCAGGTCCTGAA
GACAGGACAGAGCATGACACTGCAGTGTGCCCAGGATATGAACCATGAA
TACATGTCCTGGTATCGACAAGACCCAGGCATGGGGCTGAGGCTGATTC
ATTACTCAGTTGGTGCTGGTATCACTGACCAAGGAGAAGTCCCCAATGG
CTACAATGTCTCCAGATCAACCACAGAGGATTTCCCGCTCAGGCTGCTG
TCGGCTGCTCCCTCCCAGACATCTGTGTACTTCTGTGCCAGCAGTTACT
C

[0406] In some embodiments, TCRβ V6-5*01 comprises the amino acid sequence of SEQ ID NO: 1044, or an amino acid sequence having 85%, 90%, 95%, 99% or more identity thereof.

SEQ ID NO: 1044
MSIGLLCCAALSLLWAGPVNAGVTQTPKFQVLKTGQSMTLQCAQDMNHE
YMSWYRQDPGMGLRLIHYSVGAGITDQGEVPNGYNVSRSTTEDFPLRLL
SAAPSQTSVYFCASSY

[0407] In some embodiments, the anti-TCRβV antibody molecule, e.g., anti-TCRβ V6 (e.g., anti-TCRβ V6-5*01) antibody molecule, is a non-murine antibody molecule, e.g., a human or humanized antibody molecule. In some embodiments, the anti-TCRβV antibody molecule, e.g., anti-TCRβ V6 (e.g., anti-TCRβ V6-5*01) antibody molecule is a human antibody molecule. In some embodiments, the anti-TCRβV antibody molecule, e.g., anti-TCRβ V6 (e.g., anti-TCRβ V6-5*01) antibody molecule is a humanized antibody molecule.

[0408] In some embodiments, the anti-TCRβV antibody molecule, e.g., anti-TCRβ V6 (e.g., anti-TCRβ V6-5*01) antibody molecule, is isolated or recombinant.

[0409] In some embodiments, the anti-TCRβV antibody molecule, e.g., anti-TCRβ V6 (e.g., anti-TCRβ V6-5*01) antibody molecule, comprises at least one antigen-binding region, e.g., a variable region or an antigen-binding fragment thereof, from an antibody described herein, e.g., an antibody chosen from any one of A-H.1 to A-H.85, e.g., A-H.1, A-H.2 or A-H.68, or an antibody described in TABLE 30, or encoded by a nucleotide sequence in TABLE 30, or a sequence substantially identical (e.g., at least 80%, 85%, 90%, 92%, 95%, 97%, 98%, 99% or higher identical) to any of the aforesaid sequences.

[0410] In some embodiments, the anti-TCRβV antibody molecule, e.g., anti-TCRβ V6 (e.g., anti-TCRβ V6-5*01) antibody molecule, comprises at least one, two, three or four variable regions from an antibody described herein, e.g., an antibody chosen from any one of A-H.1 to A-H.85, e.g., A-H.1, A-H.2 or A-H.68, or an antibody described in TABLE 30, or encoded by a nucleotide sequence in TABLE 30, or a sequence substantially identical (e.g., at least 80%, 85%, 90%, 92%, 95%, 97%, 98%, 99% or higher identical) to any of the aforesaid sequences.

[0411] In some embodiments, the anti-TCRβV antibody molecule, e.g., anti-TCRβ V6 (e.g., anti-TCRβ V6-5*01) antibody molecule, comprises at least one or two heavy chain variable regions from an antibody described herein, e.g., an antibody chosen from any one of A-H.1 to A-H.85, e.g., A-H.1, A-H.2 or A-H.68, or an antibody molecule described in TABLE 30, or encoded by a nucleotide sequence in TABLE 30, or a sequence substantially identical (e.g., at least 80%, 85%, 90%, 92%, 95%, 97%, 98%, 99% or higher identical) to any of the aforesaid sequences.

[0412] In some embodiments, the anti-TCRβV antibody molecule comprises a heavy chain variable region (VH) having a consensus sequence of SEQ ID NO: 231 or 3290.

[0413] In some embodiments, the anti-TCRβV antibody molecule, e.g., anti-TCRβ V6 (e.g., anti-TCRβ V6-5*01) antibody molecule, comprises at least one or two light chain variable regions from an antibody described herein, e.g., an antibody chosen from any one of A-H.1 to A-H.85, e.g., A-H.1, A-H.2 or A-H.68, or an antibody described in TABLE 30, or encoded by a nucleotide sequence in TABLE 30, or a sequence substantially identical (e.g., at least 80%, 85%, 90%, 92%, 95%, 97%, 98%, 99% or higher identical) to any of the aforesaid sequences.

[0414] In some embodiments, the anti-TCRβV antibody molecule comprises a light chain variable region (VL) having a consensus sequence of SEQ ID NO: 230 or 3289.

[0415] In some embodiments, the anti-TCRβV antibody molecule, e.g., anti-TCRβ V6 (e.g., anti-TCRβ V6-5*01) antibody molecule, comprises a heavy chain constant region for an IgG4, e.g., a human IgG4. In still another embodiment, the anti-TCRβV antibody molecule, e.g., anti-TCRβ V6 (e.g., anti-TCRβ V6-5*01) antibody molecule includes a heavy chain constant region for an IgG1, e.g., a human IgG1. In one embodiment, the heavy chain constant region comprises an amino sequence set forth in Table 32, or a sequence substantially identical (e.g., at least 80%, 85%, 90%, 92%, 95%, 97%, 98%, 99% or higher identical) thereto.

[0416] In some embodiments, the anti-TCRβV antibody molecule, e.g., anti-TCRβ V6 (e.g., anti-TCRβ V6-5*01) antibody molecule, includes a kappa light chain constant region, e.g., a human kappa light chain constant region. In one embodiment, the light chain constant region comprises an amino sequence set forth in Table 32, or a sequence substantially identical (e.g., at least 80%, 85%, 90%, 92%, 95%, 97%, 98%, 99% or higher identical) thereto.

[0417] In some embodiments, the anti-TCRβV antibody molecule, e.g., anti-TCRβ V6 (e.g., anti-TCRβ V6-5*01) antibody molecule, includes at least one, two, or three complementarity determining regions (CDRs) from a heavy chain variable region (VH) of an antibody described herein, e.g., an antibody chosen from any one of A-H.1 to A-H.85, e.g., A-H.1, A-H.2 or A-H.68, or an antibody described in TABLE 30, or encoded by a nucleotide sequence in TABLE 30, or a sequence substantially identical (e.g., at least 80%, 85%, 90%, 92%, 95%, 97%, 98%, 99% or higher identical) to any of the aforesaid sequences.

[0418] In some embodiments, the anti-TCRβV antibody molecule, e.g., anti-TCRβ V6 (e.g., anti-TCRβ V6-5*01) antibody molecule, includes at least one, two, or three CDRs (or collectively all of the CDRs) from a heavy chain variable region comprising an amino acid sequence shown in TABLE 30, or encoded by a nucleotide sequence shown in TABLE 30. In one embodiment, one or more of the CDRs (or collectively all of the CDRs) have one, two, three, four, five, six or more changes, e.g., amino acid substitutions or deletions, relative to the amino acid sequence shown in TABLE 30, or encoded by a nucleotide sequence shown in TABLE 30.

[0419] In some embodiments, the anti-TCRβV antibody molecule, e.g., anti-TCRβ V6 (e.g., anti-TCRβ V6-5*01) antibody molecule, includes at least one, two, or three complementarity determining regions (CDRs) from a light chain variable region of an antibody described herein, e.g., an antibody chosen from any one of A-H.1 to A-H.85, e.g., A-H.1, A-H.2 or A-H.68, or an antibody described in TABLE 30, or encoded by a nucleotide sequence in TABLE 30, or a sequence substantially identical (e.g., at least 80%, 85%, 90%, 92%, 95%, 97%, 98%, 99% or higher identical) to any of the aforesaid sequences.

[0420] In some embodiments, the anti-TCRβV antibody molecule, e.g., anti-TCRβ V6 (e.g., anti-TCRβ V6-5*01) antibody molecule, includes at least one, two, or three CDRs (or collectively all of the CDRs) from a light chain variable region comprising an amino acid sequence shown in TABLE 30, or encoded by a nucleotide sequence shown in TABLE 30. In one embodiment, one or more of the CDRs (or collectively all of the CDRs) have one, two, three, four, five, six or more changes, e.g., amino acid substitutions or deletions, relative to the amino acid sequence shown in TABLE 30, or encoded by a nucleotide sequence shown in TABLE 30.

[0421] In some embodiments, the anti-TCRβV antibody molecule, e.g., anti-TCRβ V6 (e.g., anti-TCRβ V6-5*01) antibody molecule, includes at least one, two, three, four, five or six CDRs (or collectively all of the CDRs) from a heavy and light chain variable region comprising an amino acid sequence shown in TABLE 30, or encoded by a nucleotide sequence shown in TABLE 30. In one embodiment, one or more of the CDRs (or collectively all of the CDRs) have one, two, three, four, five, six or more changes, e.g., amino acid substitutions or deletions, relative to the amino acid sequence shown in TABLE 30, or encoded by a nucleotide sequence shown in TABLE 30.

[0422] In some embodiments, the anti-TCRβV antibody molecule, e.g., anti-TCRβ V6 (e.g., anti-TCRβ V6-5*01) antibody molecule, molecule includes all six CDRs from an antibody described herein, e.g., an antibody chosen from any one of A-H.1 to A-H.85, e.g., A-H.1, A-H.2 or A-H.68, or an antibody described in TABLE 30, or encoded by a nucleotide sequence in TABLE 30, or closely related CDRs, e.g., CDRs which are identical or which have at least one amino acid alteration, but not more than two, three or four alterations (e.g., substitutions, deletions, or insertions, e.g., conservative substitutions). In some embodiments, the anti-TCRβV antibody molecule, e.g., anti-TCRβ V6 (e.g., anti-TCRβ V6-5*01) antibody molecule, may include any CDR described herein.

[0423] In some embodiments, the anti-TCRβV antibody molecule, e.g., anti-TCRβ V6 (e.g., anti-TCRβ V6-5*01) antibody molecule includes at least one, two, or three CDRs according to Kabat et al. (e.g., at least one, two, or three CDRs according to the Kabat definition as set out in TABLE 30) from a heavy chain variable region of an antibody described herein, e.g., an antibody chosen from any one of A-H.1 to A-H.85, e.g., A-H.1, A-H.2 or A-H.68, or an antibody described in TABLE 30, or a sequence substantially identical (e.g., at least 80%, 85%, 90%, 92%, 95%, 97%, 98%, 99% or higher identical) to any of the aforesaid sequences; or which have at least one amino acid alteration, but not more than two, three or four alterations (e.g., substitutions, deletions, or insertions, e.g., conservative substitutions) relative to one, two, or three CDRs according to Kabat et al. shown in TABLE 30.

[0424] In some embodiments, the anti-TCRβV antibody molecule, e.g., anti-TCRβ V6 (e.g., anti-TCRβ V6-5*01) antibody molecule includes at least one, two, or three CDRs according to Kabat et al. (e.g., at least one, two, or three CDRs according to the Kabat definition as set out in TABLE 30) from a light chain variable region of an antibody described herein, e.g., an antibody chosen from any one of A-H.1 to A-H.85, e.g., A-H.1, A-H.2 or A-H.68, or an antibody described in TABLE 30, or a sequence substantially identical (e.g., at least 80%, 85%, 90%, 92%, 95%, 97%, 98%, 99% or higher identical) to any of the aforesaid sequences; or which have at least one amino acid alteration, but not more than two, three or four alterations (e.g., substitutions, deletions, or insertions, e.g., conservative substitutions) relative to one, two, or three CDRs according to Kabat et al. shown in TABLE 30.

[0425] In some embodiments, the anti-TCRβV antibody molecule, e.g., anti-TCRβ V6 (e.g., anti-TCRβ V6-5*01) antibody molecule, includes at least one, two, three, four, five, or six CDRs according to Kabat et al. (e.g., at least one, two, three, four, five, or six CDRs according to the Kabat definition as set out in TABLE 30) from the heavy and light chain variable regions of an antibody described herein, e.g., an antibody chosen from any one of A-H.1 to A-H.85, e.g., A-H.1, A-H.2 or A-H.68, or an antibody described in TABLE 30, or encoded by a nucleotide sequence in TABLE 30; or a sequence substantially identical (e.g., at least 80%, 85%, 90%, 92%, 95%, 97%, 98%, 99% or higher identical) to any of the aforesaid sequences; or which have at least one amino acid alteration, but not more than two, three or four alterations (e.g., substitutions, deletions, or insertions, e.g., conservative substitutions) relative to one, two, three, four, five, or six CDRs according to Kabat et al. shown in TABLE 30.

[0426] In some embodiments, the anti-TCRβV antibody molecule, e.g., anti-TCRβ V6 (e.g., anti-TCRβ V6-5*01) antibody molecule, includes all six CDRs according to Kabat et al. (e.g., all six CDRs according to the Kabat definition as set out in TABLE 30) from the heavy and light chain variable regions of an antibody described herein, e.g., an antibody chosen from any one of A-H.1 to A-H.85, e.g., A-H.1, A-H.2 or A-H.68, or an antibody described in TABLE 30, or encoded by a nucleotide sequence in TABLE 30; or a sequence substantially identical (e.g., at least 80%, 85%, 90%, 92%, 95%, 97%, 98%, 99% or higher identical) to any of the aforesaid sequences; or which have at least one amino acid alteration, but not more than two, three or four alterations (e.g., substitutions, deletions, or insertions, e.g., conservative substitutions) relative to all six CDRs according to Kabat et al. shown in TABLE 30.

[0427] In one embodiment, the anti-TCRβV antibody molecule, e.g., anti-TCRβ V6 (e.g., anti-TCRβ V6-5*01) antibody molecule, may include any CDR described herein.

[0428] In some embodiments, the anti-TCRβV antibody molecule, e.g., anti-TCRβ V6 (e.g., anti-TCRβ V6-5*01) antibody molecule, includes at least one, two, or three hypervariable loops that have the same canonical structures as the corresponding hypervariable loop of an antibody described herein, e.g., an antibody chosen from chosen from any one of A-H.1 to A-H.85, e.g., A-H.1, A-H.2 or A-H.68, e.g., the same canonical structures as at least loop 1 and/or loop 2 of the heavy and/or light chain variable domains of an antibody described herein. See, e.g., Chothia et al., (1992) J. Mol. Biol. 227:799-817; Tomlinson et al., (1992) J. Mol. Biol. 227:776-798 for descriptions of hypervariable loop canonical structures. These structures can be determined by inspection of the tables described in these references.

[0429] In some embodiments, the anti-TCRβV antibody molecule, e.g., anti-TCRβ V6 (e.g., anti-TCRβ V6-5*01) antibody molecule includes at least one, two, or three CDRs according to Chothia et al. (e.g., at least one, two, or three CDRs according to the Chothia definition as set out in TABLE 30) from a heavy chain variable region of an antibody described herein, e.g., an antibody chosen from any one of A-H.1 to A-H.85, e.g., A-H.1, A-H.2 or A-H.68, or as described in TABLE 30, or a sequence substantially identical (e.g., at least 80%, 85%, 90%, 92%, 95%, 97%, 98%, 99% or higher identical) to any of the aforesaid sequences; or which have at least one amino acid alteration, but not more than two, three or four alterations (e.g., substitutions, deletions, or insertions, e.g., conservative substitutions) relative to one, two, or three CDRs according to Chothia et al. shown in TABLE 30.

[0430] In some embodiments, the anti-TCRβV antibody molecule, e.g., anti-TCRβ V6 (e.g., anti-TCRβ V6-5*01) antibody molecule includes at least one, two, or three CDRs according to Chothia et al. (e.g., at least one, two, or three CDRs according to the Chothia definition as set out in TABLE 30) from a light chain variable region of an antibody described herein, e.g., an antibody chosen from any one of A-H.1 to A-H.85, e.g., A-H.1, A-H.2 or A-H.68, or an antibody described in TABLE 30, or a sequence substantially identical (e.g., at least 80%, 85%, 90%, 92%, 95%, 97%, 98%, 99% or higher identical) to any of the aforesaid sequences; or which have at least one amino acid alteration, but not more than two, three or four alterations (e.g., substitutions, deletions, or insertions, e.g., conservative substitutions) relative to one, two, or three CDRs according to Chothia et al. shown in TABLE 30.

[0431] In some embodiments, the anti-TCRβV antibody molecule, e.g., anti-TCRβ V6 (e.g., anti-TCRβ V6-5*01) antibody molecule, includes at least one, two, three, four, five, or six CDRs according to Chothia et al. (e.g., at least one, two, three, four, five, or six CDRs according to the Chothia definition as set out in TABLE 30) from the heavy and light chain variable regions of an antibody described herein, e.g., an antibody chosen from any one of A-H.1 to A-H.85, e.g., A-H.1, A-H.2 or A-H.68, or an antibody described in TABLE 30, or encoded by the nucleotide sequence in TABLE 30; or a sequence substantially identical (e.g., at least 80%, 85%, 90%, 92%, 95%, 97%, 98%, 99% or higher identical) to any of the aforesaid sequences; or which have at least one amino acid alteration, but not more than two, three or four alterations (e.g., substitutions, deletions, or insertions, e.g., conservative substitutions) relative to one, two, three, four, five, or six CDRs according to Chothia et al. shown in TABLE 30.

[0432] In some embodiments, the anti-TCRβV antibody molecule, e.g., anti-TCRβ V6 (e.g., anti-TCRβ V6-5*01) antibody molecule, includes all six CDRs according to Chothia et al. (e.g., all six CDRs according to the Chothia definition as set out in TABLE 30) from the heavy and light chain variable regions of an antibody described herein, e.g., an antibody chosen from any one of A-H.1 to A-H.85, e.g., A-H.1, A-H.2 or A-H.68, or an antibody described in TABLE 30, or encoded by a nucleotide sequence in TABLE 30; or a sequence substantially identical (e.g., at least 80%, 85%, 90%, 92%, 95%, 97%, 98%, 99% or higher identical) to any of the aforesaid sequences; or which have at least one amino acid alteration, but not more than two, three or four alterations (e.g., substitutions, deletions, or insertions, e.g., conservative substitutions) relative to all six CDRs according to Chothia et al. shown in TABLE 30. In one embodiment, the anti-TCRβV antibody molecule, e.g., anti-TCRβ V6 (e.g., anti-TCRβ V6-5*01) antibody molecule, may include any CDR described herein.

[0433] In some embodiments, the anti-TCRβV antibody molecule, e.g., anti-TCRβ V6 (e.g., anti-TCRβ V6-5*01) antibody molecule, molecule includes a combination of CDRs or hypervariable loops defined according to Kabat et al., Chothia et al., or as described in TABLE 30.

[0434] In some embodiments, the anti-TCRβV antibody molecule, e.g., anti-TCRβ V6 (e.g., anti-TCRβ V6-5*01) antibody molecule, can contain any combination of CDRs or hypervariable loops according to the Kabat and Chothia definitions.

[0435] In some embodiments, a combined CDR as set out in TABLE 30 is a CDR that comprises a Kabat CDR and a Chothia CDR.

[0436] In some embodiments, the anti-TCRβV antibody molecule, e.g., anti-TCRβ V6 (e.g., anti-TCRβ V6-5*01) antibody molecule, molecule includes a combination of CDRs or hypervariable loops identified as combined CDRs in TABLE 30. In some embodiments, the anti-TCRβV antibody molecule, e.g., anti-TCRβ V6 (e.g., anti-TCRβ V6-5*01) antibody molecule, can contain any combination of CDRs or hypervariable loops according the “combined” CDRs are described in TABLE 30.

[0437] In an embodiment, e.g., an embodiment comprising a variable region, a CDR (e.g., a combined CDR, Chothia CDR or Kabat CDR), or other sequence referred to herein, e.g., in TABLE 30, the antibody molecule is a monospecific antibody molecule, a bispecific antibody molecule, a bivalent antibody molecule, a biparatopic antibody molecule, or an antibody molecule that comprises an antigen binding fragment of an antibody, e.g., a half antibody or antigen binding fragment of a half antibody. In certain embodiments, the antibody molecule comprises a multispecific molecule, e.g., a bispecific molecule, e.g., as described herein.

[0438] In an embodiment, the anti-TCRβV antibody molecule, e.g., anti-TCR P V6 (e.g., anti-TCR P V6-5*01) antibody molecule includes:
[0439] (i) one, two or all of a light chain complementarity determining region 1 (LC CDR1), a light chain complementarity determining region 2 (LC CDR2), and a light chain complementarity determining region 3 (LC CDR3) of SEQ ID NO: 2, SEQ ID NO: 10 or SEQ ID NO: 11, and/or
[0440] (ii) one, two or all of a heavy chain complementarity determining region 1 (HC CDR1), heavy chain complementarity determining region 2 (HC CDR2), and a heavy chain complementarity determining region 3 (HC CDR3) of SEQ ID NO: 1 or SEQ ID NO: 9.

[0441] In some embodiments, the anti-TCRβV antibody molecule, e.g., anti-TCRβ V6 (e.g., anti-TCRβ V6-5*01) antibody molecule comprises a LC CDR1, LC CDR2, and LC CDR3 of SEQ ID NO: 2, and a HC CDR1, HC CDR2, and HC CDR3 of SEQ ID NO: 1.

[0442] In some embodiments the anti-TCRβV antibody molecule, e.g., anti-TCRβ V6 (e.g., anti-TCRβ V6-5*01) antibody molecule comprises a LC CDR1, LC CDR2, and LC CDR3 of SEQ ID NO: 10, and a HC CDR1, HC CDR2, and HC CDR3 of SEQ ID NO: 9.

[0443] In some embodiments, the anti-TCR PV antibody molecule, e.g., anti-TCRβ V6 (e.g., anti-TCRβ V6-5*01) antibody molecule comprises a LC CDR1, LC CDR2, and LC CDR3 of SEQ ID NO: 11, and a HC CDR1, HC CDR2, and HC CDR3 of SEQ ID NO: 9.

[0444] In an embodiment, the anti-TCRβV antibody molecule, e.g., anti-TCR P V6 (e.g., anti-TCR P V6-5*01) antibody molecule comprises:
[0445] (i) a LC CDR1 amino acid sequence of SEQ ID NO: 6, a LC CDR2 amino acid sequence of SEQ ID NO: 7, or a LC CDR3 amino acid sequence of SEQ ID NO: 8; and/or
[0446] (ii) a HC CDR1 amino acid sequence of SEQ ID NO: 3, a HC CDR2 amino acid sequence of SEQ ID NO: 4, or a HC CDR3 amino acid sequence of SEQ ID NO: 5.

[0447] In some embodiments, the anti-TCRβV antibody molecule, e.g., anti-TCRβ V6 (e.g., anti-TCRβ V6-5*01) antibody molecule comprises:
[0448] (i) a light chain variable region (VL) comprising a LC CDR1 amino acid sequence of SEQ ID NO: 6, a LC CDR2 amino acid sequence of SEQ ID NO: 7, or a LC CDR3 amino acid sequence of SEQ ID NO: 8; and/or
[0449] (ii) a heavy chain variable region (VH) comprising a HC CDR1 amino acid sequence of SEQ ID NO: 3, a HC CDR2 amino acid sequence of SEQ ID NO: 4, or a HC CDR3 amino acid sequence of SEQ ID NO: 5.

[0450] In an embodiment, the anti-TCRβV antibody molecule, e.g., anti-TCR P V6 (e.g., anti-TCR P V6-5*01) antibody molecule comprises:
[0451] (i) a LC CDR1 amino acid sequence of SEQ ID NO: 51, a LC CDR2 amino acid sequence of SEQ ID NO: 52, or a LC CDR3 amino acid sequence of SEQ ID NO: 53; and/or
[0452] (ii) a HC CDR1 amino acid sequence of SEQ ID NO: 45, a HC CDR2 amino acid sequence of SEQ ID NO: 46, or a HC CDR3 amino acid sequence of SEQ ID NO: 47.

[0453] In some embodiments, the anti-TCRβV antibody molecule, e.g., anti-TCRβ V6 (e.g., anti-TCRβV6-5*01) antibody molecule comprises:
[0454] (i) a light chain variable region (VL) comprising a LC CDR1 amino acid sequence of SEQ ID NO: 51, a LC CDR2 amino acid sequence of SEQ ID NO: 52, or a LC CDR3 amino acid sequence of SEQ ID NO: 53; and/or
[0455] (ii) a heavy chain variable region (VH) comprising a HC CDR1 amino acid sequence of SEQ ID NO: 45, a HC CDR2 amino acid sequence of SEQ ID NO: 46, or a HC CDR3 amino acid sequence of SEQ ID NO: 47.

[0456] In an embodiment, the anti-TCRβV antibody molecule, e.g., anti-TCR P V6 (e.g., anti-TCR P V6-5*01) antibody molecule comprises:
[0457] (i) a LC CDR1 amino acid sequence of SEQ ID NO: 54, a LC CDR2 amino acid sequence of SEQ ID NO: 55, or a LC CDR3 amino acid sequence of SEQ ID NO: 56; and/or
[0458] (ii) a HC CDR1 amino acid sequence of SEQ ID NO: 48, a HC CDR2 amino acid sequence of SEQ ID NO: 49, or a HC CDR3 amino acid sequence of SEQ ID NO: 50.

[0459] In some embodiments, the anti-TCRβV antibody molecule, e.g., anti-TCRβ V6 (e.g., anti-TCRβ V6-5*01) antibody molecule comprises:
[0460] (i) a light chain variable region (VL) comprising a LC CDR1 amino acid sequence of SEQ ID NO: 54, a LC CDR2 amino acid sequence of SEQ ID NO: 55, or a LC CDR3 amino acid sequence of SEQ ID NO: 56; and/or
[0461] (ii) a heavy chain variable region (VH) comprising a HC CDR1 amino acid sequence of SEQ ID NO: 48, a HC CDR2 amino acid sequence of SEQ ID NO: 49, or a HC CDR3 amino acid sequence of SEQ ID NO: 50.

[0462] In one embodiment, the light or the heavy chain variable framework (e.g., the region encompassing at least FR1, FR2, FR3, and optionally FR4) of the anti-TCRβV antibody molecule, e.g., anti-TCRβ V6 (e.g., anti-TCRβ V6-5*01) antibody molecule can be chosen from: (a) a light or heavy chain variable framework including at least 80%, 85%, 87% 90%, 92%, 93%, 95%, 97%, 98%, or 100% of the amino acid residues from a human light or heavy chain variable framework, e.g., a light or heavy chain variable framework residue from a human mature antibody, a human germline sequence, or a human consensus sequence; (b) a light or heavy chain variable framework including from 20% to 80%, 40% to 60%, 60% to 90%, or 70% to 95% of the amino acid residues from a human light or heavy chain variable framework, e.g., a light or heavy chain variable framework residue from a human mature antibody, a human germline sequence, or a human consensus sequence; (c) a non-human framework (e.g., a rodent framework); or (d) a non-human framework that has been modified, e.g., to remove antigenic or cytotoxic determinants, e.g., deimmunized, or partially humanized. In one embodiment, the light or heavy chain variable framework region (particularly FR1, FR2 and/or FR3) includes a light or heavy chain variable framework sequence at least 70, 75, 80, 85, 87, 88, 90, 92, 94, 95, 96, 97, 98, 99% identical or identical to the frameworks of a VL or VH segment of a human germline gene.

[0463] In some embodiments, the anti-TCRβV antibody molecule, e.g., anti-TCRβ V6 (e.g., anti-TCRβ V6-5*01) antibody molecule, comprises a heavy chain variable domain having at least one, two, three, four, five, six, seven, ten, fifteen, twenty or more changes, e.g., amino acid substitutions or deletions, from an amino acid sequence of any one of A-H.1 to A-H.85, e.g., A-H.1, A-H.2 or A-H.68, e.g., the amino acid sequence of the FR region in the entire variable region, e.g., shown in FIG. 1A, or in SEQ ID NO: 9.

[0464] Alternatively, or in combination with the heavy chain substitutions described herein, the anti-TCRβV antibody molecule, e.g., anti-TCR P V6 (e.g., anti-TCRβ V6-5*01) antibody molecule, comprises a light chain variable domain having at least one, two, three, four, five, six, seven, ten, fifteen, twenty or more amino acid changes, e.g., amino acid substitutions or deletions, from an amino acid sequence of any one of A-H.1 to A-H.85, e.g., A-H.1, A-H.2 or A-H.68, e.g., the amino acid sequence of the FR region in the entire variable region, e.g., shown in FIG. 1B, or in SEQ ID NO: 10 or SEQ ID NO: 11.

[0465] In some embodiments, the anti-TCRβV antibody molecule, e.g., anti-TCRβ V6 (e.g., anti-TCRβ V6-5*01) antibody molecule, includes one, two, three, or four heavy chain framework regions shown in FIG. 1A, or a sequence substantially identical thereto.

[0466] In some embodiments, the anti-TCRβV antibody molecule, e.g., anti-TCRβ V6 (e.g., anti-TCRβ V6-5*01) antibody molecule, includes one, two, three, or four light chain framework regions shown in FIG. 1B, or a sequence substantially identical thereto.

[0467] In some embodiments, the anti-TCRβV antibody molecule, e.g., anti-TCRβ V6 (e.g., anti-TCRβ V6-5*01) antibody molecule, comprises the light chain framework region 1 of A-H.1 or A-H.2, e.g., as shown in FIG. 1B.

[0468] In some embodiments, the anti-TCRβV antibody molecule, e.g., anti-TCRβ V6 (e.g., anti-TCRβ V6-5*01) antibody molecule, comprises the light chain framework region 2 of A-H.1 or A-H.2, e.g., as shown in FIG. 1B.

[0469] In some embodiments, the anti-TCRβV antibody molecule, e.g., anti-TCRβ V6 (e.g., anti-TCRβ V6-5*01) antibody molecule, comprises the light chain framework region 3 of A-H.1 or A-H.2, e.g., as shown in FIG. 1B.

[0470] In some embodiments, the anti-TCRβV antibody molecule, e.g., anti-TCRβ V6 (e.g., anti-TCRβ V6-5*01) antibody molecule, comprises the light chain framework region 4 of A-H.1 or A-H.2, e.g., as shown in FIG. 1B.

[0471] In some embodiments, the anti-TCRβV antibody molecule, e.g., anti-TCRβ V6 (e.g., anti-TCRβ V6-5*01) antibody molecule, comprises a light chain variable domain comprising a framework region, e.g., framework region 1 (FR1), comprising a change, e.g., a substitution (e.g., a conservative substitution) at position 10 according to Kabat numbering. In some embodiments, the FR1 comprises a Phenylalanine at position 10, e.g., a Serine to Phenyalanine substitution. In some embodiments, the substitution is relative to a human germline light chain framework region sequence.

[0472] In some embodiments, the anti-TCRβV antibody molecule, e.g., anti-TCRβ V6 (e.g., anti-TCRβ V6-5*01) antibody molecule, comprises a light chain variable domain comprising a framework region, e.g., framework region 2 (FR2), comprising a change, e.g., a substitution (e.g., a conservative substitution) at a position disclosed herein according to Kabat numbering. In some embodiments, FR2 comprises a Histidine at position 36, e.g., a substitution at position 36 according to Kabat numbering, e.g., a Tyrosine to Histidine substitution. In some embodiments, FR2 comprises an Alanine at position 46, e.g., a substitution at position 46 according to Kabat numbering, e.g., an Arginine to Alanine substitution. In some embodiments, the substitution is relative to a human germline light chain framework region sequence.

[0473] In some embodiments, the anti-TCRβV antibody molecule, e.g., anti-TCRβ V6 (e.g., anti-TCRβ V6-5*01) antibody molecule, comprises a light chain variable domain comprising a framework region, e.g., framework region 3 (FR3), comprising a change, e.g., a substitution (e.g., a conservative substitution) at a position disclosed herein according to Kabat numbering. In some embodiments, FR3 comprises a Phenyalanine at position 87, e.g., a substitution at position 87 according to Kabat numbering, e.g., a Tyrosine to Phenyalanine substitution. In some embodiments, the substitution is relative to a human germline light chain framework region sequence.

[0474] In some embodiments, the anti-TCRβV antibody molecule, e.g., anti-TCRβ V6 (e.g., anti-TCRβ V6-5*01) antibody molecule, comprises a light chain variable domain comprising: (a) a framework region 1 (FR1) comprising a Phenylalanine at position 10, e.g., a substitution at position 10 according to Kabat numbering, e.g., a Serine to Phenyalanine substitution; (b) a framework region 2 (FR2) comprising a Histidine at position 36, e.g., a substitution at position 36 according to Kabat numbering, e.g., a Tyrosine to Histidine substitution, and a Alanine at position 46, e.g., a substitution at position 46 according to Kabat numbering, e.g., a Arginine to Alanine substitution; and (c) a framework region 3 (FR3) comprising a Phenylalanine at position 87, e.g., a substitution at position 87 according to Kabat numbering, e.g., a Tyrosine to Phenyalanine substitution, e.g., as shown in the amino acid sequence of SEQ ID NO: 10. In some embodiments, the substitution is relative to a human germline light chain framework region sequence.

[0475] In some embodiments, the anti-TCRβV antibody molecule, e.g., anti-TCRβ V6 (e.g., anti-TCRβ V6-5*01) antibody molecule, comprises a light chain variable domain comprising: (a) a framework region 2 (FR2) comprising a Histidine at position 36, e.g., a substitution at position 36 according to Kabat numbering, e.g., a Tyrosine to Histidine substitution, and a Alanine at position 46, e.g., a substitution at position 46 according to Kabat numbering, e.g., a Arginine to Alanine substitution; and (b) a framework region 3 (FR3) comprising a Phenylalanine at position 87, e.g., a substitution at position 87 according to Kabat numbering, e.g., a Tyrosine to Phenyalanine substitution, e.g., as shown in the amino acid sequence of SEQ ID NO: 11. In some embodiments, the substitution is relative to a human germline light chain framework region sequence.

[0476] In some embodiments, the anti-TCRβV antibody molecule, e.g., anti-TCRβ V6 (e.g., anti-TCRβ V6-5*01) antibody molecule, comprises a light chain variable domain comprising: (a) a framework region 1 (FR1) comprising a change, e.g., a substitution (e.g., a conservative substitution) at one or more (e.g., all) positions disclosed herein according to Kabat numbering, (b) a framework region 2 (FR2) comprising a change, e.g., a substitution (e.g., a conservative substitution) at one or more (e.g., all) position disclosed herein according to Kabat numbering and (c) a framework region 3 (FR3) comprising a change, e.g., a substitution (e.g., a conservative substitution) at one or more (e.g., all) position disclosed herein according to Kabat numbering. In some embodiments, the substitution is relative to a human germline light chain framework region sequence.

[0477] In some embodiments, the anti-TCRβV antibody molecule, e.g., anti-TCRβ V6 (e.g., anti-TCRβ V6-5*01) antibody molecule, comprises the heavy chain framework region 1 of A-H.1 or A-H.2, e.g., as shown in FIG. 1A.

[0478] In some embodiments, the anti-TCRβV antibody molecule, e.g., anti-TCRβ V6 (e.g., anti-TCRβ V6-5*01) antibody molecule, comprises the heavy chain framework region 2 of A-H.1 or A-H.2, e.g., as shown in FIG. 1A

[0479] In some embodiments, the anti-TCRβV antibody molecule, e.g., anti-TCRβ V6 (e.g., anti-TCRβ V6-5*01) antibody molecule, comprises the heavy chain framework region 3 of A-H.1 or A-H.2, e.g., as shown in FIG. 1A.

[0480] In some embodiments, the anti-TCRβV antibody molecule, e.g., anti-TCRβ V6 (e.g., anti-TCRβ V6-5*01) antibody molecule, comprises the heavy chain framework region 4 of A-H.1 or A-H.2, e.g., as shown in FIG. 1A.

[0481] In some embodiments, the anti-TCRβV antibody molecule, e.g., anti-TCRβ V6 (e.g., anti-TCRβ V6-5*01) antibody molecule, comprises a heavy chain variable domain comprising a framework region, e.g., framework region 3 (FR3), comprising a change, e.g., a substitution (e.g., a conservative substitution) at a position disclosed herein according to Kabat numbering. In some embodiments, FR3 comprises a Threonine at position 73, e.g., a substitution at position 73 according to Kabat numbering, e.g., a Glutamic Acid to Threonine substitution. In some embodiments, FR3 comprises a Glycine at position 94, e.g., a substitution at position 94 according to Kabat numbering, e.g., an Arginine to Glycine substitution. In some embodiments, the substitution is relative to a human germline heavy chain framework region sequence.

[0482] In some embodiments, the anti-TCRβV antibody molecule, e.g., anti-TCRβ V6 (e.g., anti-TCRβ V6-5*01) antibody molecule, comprises a heavy chain variable domain comprising a framework region 3 (FR3) comprising a Threonine at position 73, e.g., a substitution at position 73 according to Kabat numbering, e.g., a Glutamic Acid to Threonine substitution, and a Glycine at position 94, e.g., a substitution at position 94 according to Kabat numbering, e.g., a Arginine to Glycine substitution, e.g., as shown in the amino acid sequence of SEQ ID NO: 10.

[0483] In some embodiments, the anti-TCRβV antibody molecule, e.g., anti-TCRβ V6 (e.g., anti-TCRβ V6-5*01) antibody molecule, comprises the heavy chain framework regions 1-4 of A-H.1 or A-H.2, e.g., SEQ ID NO: 9, or as shown in FIGS. 1A and 1B.

[0484] In some embodiments, the anti-TCRβV antibody molecule, e.g., anti-TCRβ V6 (e.g., anti-TCRβ V6-5*01) antibody molecule, comprises the light chain framework regions 1-4 of A-H.1, e.g., SEQ ID NO: 10, or as shown in FIGS. 1A and 1B.

[0485] In some embodiments, the anti-TCRβV antibody molecule, e.g., anti-TCRβ V6 (e.g., anti-TCRβ V6-5*01) antibody molecule, comprises the light chain framework regions 1-4 of A-H.2, e.g., SEQ ID NO: 11, or as shown in FIGS. 1A and 1B.

[0486] In some embodiments, the anti-TCRβV antibody molecule, e.g., anti-TCRβ V6 (e.g., anti-TCRβ V6-5*01) antibody molecule, comprises the heavy chain framework regions 1-4 of A-H.1, e.g., SEQ ID NO: 9; and the light chain framework regions 1-4 of A-H.1, e.g., SEQ ID NO: 10, or as shown in FIGS. 1A and 1B.

[0487] In some embodiments, the anti-TCRβV antibody molecule, e.g., anti-TCRβ V6 (e.g., anti-TCRβ V6-5*01) antibody molecule, comprises the heavy chain framework regions 1-4 of A-H.2, e.g., SEQ ID NO: 9; and the light chain framework regions 1-4 of A-H.2, e.g., SEQ ID NO: 11, or as shown in FIGS. 1A and 1B.

[0488] In some embodiments, the heavy or light chain variable domain, or both, of the anti-TCRβV antibody molecule, e.g., anti-TCRβ V6 (e.g., anti-TCRβ V6-5*01) antibody molecule, includes an amino acid sequence, which is substantially identical to an amino acid disclosed herein, e.g., at least 80%, 85%, 90%, 92%, 95%, 97%, 98%, 99% or higher identical to a variable region of an antibody described herein, e.g., an antibody chosen from any one of A-H.1 to A-H.85, e.g., A-H.1, A-H.2 or A-H.68, or as described in TABLE 30, or encoded by the nucleotide sequence in TABLE 30; or which differs at least 1 or 5 residues, but less than 40, 30, 20, or 10 residues, from a variable region of an antibody described herein.

[0489] In some embodiments, the anti-TCRβV antibody molecule, e.g., anti-TCRβ V6 (e.g., anti-TCRβ V6-5*01) antibody molecule, comprises at least one, two, three, or four antigen-binding regions, e.g., variable regions, having an amino acid sequence as set forth in TABLE 30, or a sequence substantially identical thereto (e.g., a sequence at least about 85%, 90%, 95%, 99% or more identical thereto, or which differs by no more than 1, 2, 5, 10, or 15 amino acid residues from the sequences shown in TABLE 30. In another embodiment, the anti-TCRβV antibody molecule, e.g., anti-TCRβ V6 (e.g., anti-TCRβ V6-5*01) antibody molecule includes a VH and/or VL domain encoded by a nucleic acid having a nucleotide sequence as set forth in TABLE 30, or a sequence substantially identical thereto (e.g., a sequence at least about 85%, 90%, 95%, 99% or more identical thereto, or which differs by no more than 3, 6, 15, 30, or 45 nucleotides from the sequences shown in TABLE 30.

[0490] In some embodiments, the anti-TCRβV antibody molecule, e.g., anti-TCRβ V6 (e.g., anti-TCRβ V6-5*01) antibody molecule, comprises:
[0491] a VH domain comprising the amino acid sequence of SEQ ID NO: 9, an amino acid sequence at least about 85%, 90%, 95%, 99% or more identical to the amino acid sequence of SEQ ID NO: 9, or an amino acid sequence which differs by no more than 1, 2, 5, 10, or 15 amino acid residues from the amino acid sequence of SEQ ID NO: 9; and/or
[0492] a VL domain comprising the amino acid sequence of SEQ ID NO: 10, an amino acid sequence at least about 85%, 90%, 95%, 99% or more identical to the amino acid sequence of SEQ ID NO: 10, or an amino acid sequence which differs by no more than 1, 2, 5, 10, or 15 amino acid residues from the amino acid sequence of SEQ ID NO: 10.

[0493] In some embodiments, the anti-TCRβV antibody molecule, e.g., anti-TCRβ V6 (e.g., anti-TCRβ V6-5*01) antibody molecule, comprises:
[0494] a VH domain comprising the amino acid sequence of SEQ ID NO: 9, an amino acid sequence at least about 85%, 90%, 95%, 99% or more identical to the amino acid sequence of SEQ ID NO: 9, or an amino acid sequence which differs by no more than 1, 2, 5, 10, or 15 amino acid residues from the amino acid sequence of SEQ ID NO: 9; and/or
[0495] a VL domain comprising the amino acid sequence of SEQ ID NO: 11, an amino acid sequence at least about 85%, 90%, 95%, 99% or more identical to the amino acid sequence of SEQ ID NO: 11, or an amino acid sequence which differs by no more than 1, 2, 5, 10, or 15 amino acid residues from the amino acid sequence of SEQ ID NO: 11.

[0496] In some embodiments, the anti-TCRβV antibody molecule, e.g., anti-TCRβ V6 (e.g., anti-TCRβ V6-5*01) antibody molecule is a full antibody or fragment thereof (e.g., a Fab, F(ab′)₂, Fv, or a single chain Fv fragment (scFv)). In some embodiments, the anti-TCRβV antibody molecule, e.g., anti-TCRβ V6 (e.g., anti-TCRβ V6-5*01) antibody molecule is a monoclonal antibody or an antibody with single specificity. In some embodiments, the anti-TCRβV antibody molecule, e.g., anti-TCRβ V6 (e.g., anti-TCRβ V6-5*01) antibody molecule, can also be a humanized, chimeric, camelid, shark, or an in vitro-generated antibody molecule. In some embodiments, the anti-TCRβV antibody molecule, e.g., anti-TCRβ V6 (e.g., anti-TCRβ V6-5*01) antibody molecule, is a humanized antibody molecule. The heavy and light chains of the anti-TCRβV antibody molecule, e.g., anti-TCRβ V6 (e.g., anti-TCRβ V6-5*01) antibody molecule, can be full-length (e.g., an antibody can include at least one, and preferably two, complete heavy chains, and at least one, and preferably two, complete light chains) or can include an antigen-binding fragment (e.g., a Fab, F(ab′)₂, Fv, a single chain Fv fragment, a single domain antibody, a diabody (dAb), a bivalent antibody, or bispecific antibody or fragment thereof, a single domain variant thereof, or a camelid antibody).

[0497] In some embodiments, the anti-TCRβV antibody molecule, e.g., anti-TCRβ V6 (e.g., anti-TCRβ V6-5*01) antibody molecule, is in the form of a multispecific molecule, e.g., a bispecific molecule, e.g., as described herein.

[0498] In some embodiments, the anti-TCRβV antibody molecule, e.g., anti-TCRβ V6 (e.g., anti-TCRβ V6-5*01) antibody molecule, has a heavy chain constant region (Fc) chosen from, e.g., the heavy chain constant regions of IgG1, IgG2, IgG3, IgG4, IgM, IgA1, IgA2, IgD, and IgE. In some embodiments, the Fc region is chosen from the heavy chain constant regions of IgG1, IgG2, IgG3, and IgG4. In some embodiments, the Fc region is chosen from the heavy chain constant region of IgG1 or IgG2 (e.g., human IgG1, or IgG2). In some embodiments, the heavy chain constant region is human IgG1. In some embodiments, the Fc region comprises a Fc region variant, e.g., as described herein.

[0499] In some embodiments, the anti-TCRβV antibody molecule, e.g., anti-TCRβ V6 (e.g., anti-TCRβV6-5*01) antibody molecule, has a light chain constant region chosen from, e.g., the light chain constant regions of kappa or lambda, preferably kappa (e.g., human kappa). In one embodiment, the constant region is altered, e.g., mutated, to modify the properties of the anti-TCRβV antibody molecule, e.g., anti-TCRβ V6 (e.g., anti-TCRβ V6-5*01) antibody molecule (e.g., to increase or decrease one or more of: Fc receptor binding, antibody glycosylation, the number of cysteine residues, effector cell function, or complement function). For example, the constant region is mutated at positions 296 (M to Y), 298 (S to T), 300 (T to E), 477 (H to K) and 478 (N to F) to alter Fc receptor binding (e.g., the mutated positions correspond to positions 132 (M to Y), 134 (S to T), 136 (T to E), 313 (H to K) and 314 (N to F) of SEQ ID NOs: 212 or 214; or positions 135 (M to Y), 137 (S to T), 139 (T to E), 316 (H to K) and 317 (N to F) of SEQ ID NOs: 215, 216, 217 or 218), e.g., relative to human IgG1.

[0500] Antibody A-H.1 comprises a heavy chain comprising the amino acid sequence of SEQ ID NO: 3278 and a light chain comprising the amino acid sequence of SEQ ID NO: 72. Antibody A-H.2 comprises a heavy chain comprising the amino acid sequence of SEQ ID NO: 3278 and a light chain comprising the amino acid sequence of SEQ ID NO: 3279. Antibody A-H.68 comprises the amino acid sequence of SEQ ID NO: 1337, or a sequence having at least 85%, 90%, 95%, 96%, 97%, 98%, or 99% identity thereto.

[0501] Additional exemplary humanized anti-TCRB V6 antibodies are provided in TABLE 30. In some embodiments, the anti-TCRβ V6 is antibody A, e.g., humanized antibody A (antibody A-H), as provided in TABLE 30. In some embodiments, the anti-TCRβV antibody comprises one or more (e.g., all three) of a LC CDR1, LC CDR2, and LC CDR3 provided in TABLE 30; and/or one or more (e.g., all three) of a HC CDR1, HC CDR2, and HC CDR3 provided in TABLE 30, or a sequence with at least 85%, 90%, 95%, 96%, 97%, 98%, or 99% identity thereto. In some embodiments, antibody A comprises a variable heavy chain (VH) and/or a variable light chain (VL) provided in TABLE 30, or a sequence with at least 85%, 90%, 95%, 96%, 97%, 98%, or 99% identity thereto.

[0502] In some embodiments, the anti-TCRβV antibody molecule, e.g., anti-TCRβ V6 (e.g., anti-TCRβ V6-5*01) antibody molecule comprises a VH and/or a VL of an antibody described in Table 1, or a sequence with at least 80%, 85%, 90%, 95%, 96%, 97%, 98%, 99% or more identity thereto. In some embodiments, the anti-TCRβV antibody molecule, e.g., anti-TCR P V6 (e.g., anti-TCR P V6-5*01) antibody molecule comprises a VH of an antibody described in Table 1, or a sequence with at least 80%, 85%, 90%, 95%, 96%, 97%, 98%, 99% or more identity thereto. In some embodiments, the anti-TCRβV antibody molecule, e.g., anti-TCRβ V6 (e.g., anti-TCRβ V6-5*01) antibody molecule comprises a VL of an antibody described in Table 1, or a sequence with at least 80%, 85%, 90%, 95%, 96%, 97%, 98%, 99% or more identity thereto.

[0503] In some embodiments, the anti-TCRβV antibody molecule, e.g., anti-TCRβ V6 (e.g., anti-TCRβ V6-5*01) antibody molecule comprises a VH and a VL of an antibody described in Table 1, or a sequence with at least 80%, 85%, 90%, 95%, 96%, 97%, 98%, 99% or more identity thereto.

[0504] In some embodiments, the anti-TCRβV antibody molecule, e.g., anti-TCRβ V6 (e.g., anti-TCRβV6-5*01) antibody molecule comprises a VH of A-H.1, A-H.2, A-H.3, A-H.4, A-H.5, A-H.6, A-H.7, A-H.8, A-H.9, A-H.10, A-H.11, A-H.12, A-H.13, A-H.14, A-H.15, A-H.16, A-H.17, A-H.18, A-H.19, A-H.20, A-H.21, A-H.22, A-H.23, A-H.24, A-H.25, A-H.26, A-H.27, A-H.28, A-H.29, A-H.30, A-H.31, A-H.32, A-H.33, A-H.34, A-H.35, A-H.36, A-H.37, A-H.38, A-H.39, A-H.40, A-H.1, A-H.42, A-H.43, A-H.44, A-H.45, A-H.46, A-H.47, A-H.48, A-H.49, A-H.50, A-H.51, A-H.52, A-H.53, A-H.54, A-H.55, A-H.56, A-H.57, A-H.58, A-H.59, A-H.60, A-H.61, A-H.62, A-H.63, A-H.64, A-H.65, A-H.66, A-H.67, A-H.68, A-H.69, A-H.70, A-H.71, A-H.72, A-H.73, A-H.74, A-H.75, A-H.76, A-H.77, A-H.78, A-H.79, A-H.80, A-H.81, A-H.82, A-H.83, A-H.84, or A-H.85, or a sequence with at least 80%, 85%, 90%, 95%, 96%, 97%, 98%, 99% or more identity thereto.

[0505] In some embodiments, the anti-TCRβV antibody molecule, e.g., anti-TCRβ V6 (e.g., anti-TCRβ V6-5*01) antibody molecule comprises a VL of A-H.1, A-H.2, A-H.3, A-H.4, A-H.5, A-H.6, A-H.7, A-H.8, A-H.9, A-H.10, A-H.11, A-H.12, A-H.13, A-H.14, A-H.15, A-H.16, A-H.17, A-H.18, A-H.19, A-H.20, A-H.21, A-H.22, A-H.23, A-H.24, A-H.25, A-H.26, A-H.27, A-H.28, A-H.29, A-H.30, A-H.31, A-H.32, A-H.33, A-H.34, A-H.35, A-H.36, A-H.37, A-H.38, A-H.39, A-H.40, A-H.1, A-H.42, A-H.43, A-H.44, A-H.45, A-H.46, A-H.47, A-H.48, A-H.49, A-H.50, A-H.51, A-H.52, A-H.53, A-H.54, A-H.55, A-H.56, A-H.57, A-H.58, A-H.59, A-H.60, A-H.61, A-H.62, A-H.63, A-H.64, A-H.65, A-H.66, A-H.67, A-H.68, A-H.69, A-H.70, A-H.71, A-H.72, A-H.73, A-H.74, A-H.75, A-H.76, A-H.77, A-H.78, A-H.79, A-H.80, A-H.81, A-H.82, A-H.83, A-H.84, or A-H.85, or a sequence with at least 80%, 85%, 90%, 95%, 96%, 97%, 98%, 99% or more identity thereto.

[0506] In some embodiments, the anti-TCRβV antibody molecule, e.g., anti-TCRβ V6 (e.g., anti-TCRβ V6-5*01) antibody molecule comprises a VH of A-H.1, A-H.2, A-H.3, A-H.4, A-H.5, A-H.6, A-H.7, A-H.8, A-H.9, A-H.10, A-H.11, A-H.12, A-H.13, A-H.14, A-H.15, A-H.16, A-H.17, A-H.18, A-H.19, A-H.20, A-H.21, A-H.22, A-H.23, A-H.24, A-H.25, A-H.26, A-H.27, A-H.28, A-H.29, A-H.30, A-H.31, A-H.32, A-H.33, A-H.34, A-H.35, A-H.36, A-H.37, A-H.38, A-H.39, A-H.40, A-H.1, A-H.42, A-H.43, A-H.44, A-H.45, A-H.46, A-H.47, A-H.48, A-H.49, A-H.50, A-H.51, A-H.52, A-H.53, A-H.54, A-H.55, A-H.56, A-H.57, A-H.58, A-H.59, A-H.60, A-H.61, A-H.62, A-H.63, A-H.64, A-H.65, A-H.66, A-H.67, A-H.68, A-H.69, A-H.70, A-H.71, A-H.72, A-H.73, A-H.74, A-H.75, A-H.76, A-H.77, A-H.78, A-H.79, A-H.80, A-H.81, A-H.82, A-H.83, A-H.84, or A-H.85, or a sequence with at least 80%, 85%, 90%, 95%, 96%, 97%, 98%, 99% or more identity thereto; and a VL of A-H.1, A-H.2, A-H.3, A-H.4, A-H.5, A-H.6, A-H.7, A-H.8, A-H.9, A-H.10, A-H.11, A-H.12, A-H.13, A-H.14, A-H.15, A-H.16, A-H.17, A-H.18, A-H.19, A-H.20, A-H.21, A-H.22, A-H.23, A-H.24, A-H.25, A-H.26, A-H.27, A-H.28, A-H.29, A-H.30, A-H.31, A-H.32, A-H.33, A-H.34, A-H.35, A-H.36, A-H.37, A-H.38, A-H.39, A-H.40, A-H.1, A-H.42, A-H.43, A-H.44, A-H.45, A-H.46, A-H.47, A-H.48, A-H.49, A-H.50, A-H.51, A-H.52, A-H.53, A-H.54, A-H.55, A-H.56, A-H.57, A-H.58, A-H.59, A-H.60, A-H.61, A-H.62, A-H.63, A-H.64, A-H.65, A-H.66, A-H.67, A-H.68, A-H.69, A-H.70, A-H.71, A-H.72, A-H.73, A-H.74, A-H.75, A-H.76, A-H.77, A-H.78, A-H.79, A-H.80, A-H.81, A-H.82, A-H.83, A-H.84, or A-H.85, or a sequence with at least 80%, 85%, 90%, 95%, 96%, 97%, 98%, 99% or more identity thereto.

TABLE 30
Amino acid and nucleotide sequences for murine, chimeric and humanized antibody
molecules which bind to TCRVB 6, e.g., TCRVB 6-5. The antibody molecules include murine mAb
Antibody A, and humanized mAb Antibody A-H Clones A-H.1 to A-H.85. The amino acid the heavy
and light chain CDRs, and the amino acid and nucleotide sequences of the heavy and light
chain variable regions, and the heavy and light chains are shown.
Antibody A (murine), also referred to as H131, binds to TCRVB 6-5

| | | |
|---|---|---|
| SEQ ID NO: 3 | HC CDR1 (Combined) | GYSFTTYYIH |
| SEQ ID NO: 4 | HC CDR2 (Combined) | WFFPGSGNIKYNEKFKG |
| SEQ ID NO: 5 | HC CDR3 (Combined) | SYYSYDVLDY |
| SEQ ID NO: 45 | HC CDR1 (Kabat) | TYYIH |
| SEQ ID NO: 46 | HC CDR2 (Kabat) | WFFPGSGNIKYNEKFKG |
| SEQ ID NO: 47 | HC CDR3 (Kabat) | SYYSYDVLDY |
| SEQ ID NO: 48 | HC CDR1 (Chothia) | GYSFTTY |
| SEQ ID NO: 49 | HC CDR2 (Chothia) | FPGSGN |
| SEQ ID NO: 50 | HC CDR3 (Chothia) | SYYSYDVLDY |
| SEQ ID NO: 1 | VH | QVQLQQSGPELVKPGTSVKISCKASGYSFTTYYI |
| | | HWVKQRPGQGLEWIGWFFPGSGNIKYNEKFKG |
| | | KATLTADTSSSTAYMQLSSLTSEESAVYFCAGSY |
| | | YSYDVLDYWGHGTTLTVSS |
| SEQ ID NO: 6 | LC CDR1 (Combined) | KASQNVGINVV |
| SEQ ID NO: 7 | LC CDR2 (Combined) | SSSHRYS |
| SEQ ID NO: 8 | LC CDR3 (Combined) | QQFKSYPLT |
| SEQ ID NO: 51 | LC CDR1 (Kabat) | KASQNVGINVV |
| SEQ ID NO: 52 | LC CDR2 (Kabat) | SSSHRYS |
| SEQ ID NO: 53 | LC CDR3 (Kabat) | QQFKSYPLT |
| SEQ ID NO: 54 | LC CDR1 (Chothia) | KASQNVGINVV |
| SEQ ID NO: 55 | LC CDR2 (chothia) | SSSHRYS |
| SEQ ID NO: 56 | LC CDR3 (chothia) | QQFKSYPLT |
| SEQ ID NO: 2 | VL | DILMTQSQKFMSTSLGDRVSVSCKASQNVGINV |
| | | VWHQQKPGQSPKALIYSSSHRYSGVPDRFTGSG |
| | | SGTDFTLTINNVQSEDLAEYFCQQFKSYPLTFGA |
| | | GTKLELK |

Antibody A humanized (A-H antibody)
A-H.1 antibody

| | | |
|---|---|---|
| SEQ ID NO: 3 | HC CDR1 (Combined) | GYSFTTYYIH |
| SEQ ID NO: 4 | HC CDR2 (Combined) | WFFPGSGNIKYNEKFKG |
| SEQ ID NO: 5 | HC CDR3 (Combined) | SYYSYDVLDY |
| SEQ ID NO: 9 | VH | QVQLVQSGAEVKKPGSSVKVSCKASGYSFTTYY |
| | | IHWVRQAPGQGLEWMGWFFPGSGNIKYNEKFK |
| | | GRVTITADTSTSTAYMELSSLRSEDTAVYYCAGS |
| | | YYSYDVLDYWGQGTTVTVSS |
| SEQ ID NO: 12 | DNA VH | CAGGTGCAGCTGGTTCAGTCTGGCGCCGAAGT |
| | | GAAGAAACCTGGCTCCTCCGTGAAGGTGTCCT |
| | | GCAAGGCTTCCGGCTACTCCTTCACCACCTAC |
| | | TACATCCACTGGGTCCGACAGGCCCCTGGACA |
| | | AGGATTGGAATGGATGGGCTGGTTCTTCCCCG |
| | | GCTCCGGCAACATCAAGTACAACGAGAAGTTC |
| | | AAGGGCCGCGTGACCATCACCGCCGACACCTC |
| | | TACCTCTACCGCCTACATGGAACTGTCCAGCC |
| | | TGAGATCTGAGGACACCGCCGTGTACTACTGC |
| | | GCCGGCTCCTACTACTCTTACGACGTGCTGGA |
| | | TTACTGGGGCCAGGGCACCACAGTGACAGTGT |
| | | CCTCT |
| SEQ ID NO: 69 | VH-IgM constant delta | METDTLLLWVLLLWVPGSTGQVQLVQSGAEVK |
| | CDC | KPGSSVKVSCKASGYSFTTYYIHWVRQAPGQGL |
| | | EWMGWFFPGSGNIKYNEKFKGRVTITADTSTST |
| | | AYMELSSLRSEDTAVYYCAGSYYSYDVLDYWG |
| | | QGTTVTVSSGSASAPTLFPLVSCENSPSDTSSVA |
| | | VGCLAQDFLPDSITFSWKYKNNSDISSTRGFPSV |
| | | LRGGKYAATSQVLLPSKDVMQGTDEHVVCKVQ |
| | | HPNGNKEKNVPLPVIAELPPKVSVFVPPRDGFFG |
| | | NPRKSKLICQATGFSPRQIQVSWLREGKQVGSG |
| | | VTTDQVQAEAKESGPTTYKVTSTLTIKESDWLG |
| | | QSMFTCRVDHRGLTFQQNASSMCVPDQDTAIRV |
| | | FAIPPSFASIFLTKSTKLTCLVTDLTTYDSVTISWT |
| | | RQNGEAVKTHTNISESHPNATFSAVGEASICEDD |
| | | WNSGERFTCTVTHTDLASSLKQTISRPKGVALH |
| | | RPDVYLLPPAREQLNLRESATITCLVTGFSPADV |
| | | FVQWMQRGQPLSPEKYVTSAPMPEPQAPGRYF |
| | | AHSILTVSEEEWNTGETYTCVVAHEALPNRVTE |
| | | RTVDKSTGKPTLYNVSLVMSDTAGTCY |
| SEQ ID NO: 70 | VH-IgGA1 | METDTLLLWVLLLWVPGSTGQVQLVQSGAEVK |
| | | KPGSSVKVSCKASGYSFTTYYIHWVRQAPGQGL |
| | | EWMGWFFPGSGNIKYNEKFKGRVTITADTSTST |
| | | AYMELSSLRSEDTAVYYCAGSYYSYDVLDYWG |
| | | QGTTVTVSSASPTSPKVFPLSLCSTQPDGNVVIA |
| | | CLVQGFFPQEPLSVTWSESGQGVTARNFPPSQD |
| | | ASGDLYTTSSQLTLPATQCLAGKSVTCHVKHYT |
| | | NPSQDVTVPCPVPSTPPTPSPSTPPTPSPSCCHPRL |
| | | SLHRPALEDLLLGSEANLTCTLTGLRDASGVTFT |
| | | WTPSSGKSAVQGPPERDLCGCYSVSSVLPGCAE |
| | | PWNHGKTFTCTAAYPESKTPLTATLSKSGNTFRP |
| | | EVHLLPPPSEELALNELVTLTCLARGFSPKDVLV |
| | | RWLQGSQELPREKYLTWASRQEPSQGTTTFAVT |
| | | SILRVAAEDWKKGDTFSCMVGHEALPLAFTQKT |
| | | IDRLAGKPTHVNVSVVMAEVDGTCY |
| SEQ ID NO: 71 | VH-IgGA2 | METDTLLLWVLLLWVPGSTGQVQLVQSGAEVK |
| | | KPGSSVKVSCKASGYSFTTYYIHWVRQAPGQGL |
| | | EWMGWFFPGSGNIKYNEKFKGRVTITADTSTST |
| | | AYMELSSLRSEDTAVYYCAGSYYSYDVLDYWG |
| | | QGTTVTVSSASPTSPKVFPLSLDSTPQDGNVVVA |
| | | CLVQGFFPQEPLSVTWSESGQNVTARNFPPSQD |
| | | ASGDLYTTSSQLTLPATQCPDGKSVTCHVKHYT |
| | | NSSQDVTVPCRVPPPPPCCHPRLSLHRPALEDLL |
| | | LGSEANLTCTLTGLRDASGATFTWTPSSGKSAV |
| | | QGPPERDLCGCYSVSSVLPGCAQPWNHGETFTC |
| | | TAAHPELKTPLTANITKSGNTFRPEVHLLPPPSEE |
| | | LALNELVTLTCLARGFSPKDVLVRWLQGSQELP |
| | | REKYLTWASRQEPSQGTTTYAVTSILRVAAEDW |
| | | KKGETFSCMVGHEALPLAFTQKTIDRMAGKPTH |
| | | INVSVVMAEADGTCY |
| SEQ ID NO: | Heavy chain | METDTLLLWVLLLWVPGSTGQVQLVQSGAEVK |
| 3278 | | KPGSSVKVSCKASGYSFTTYYIHWVRQAPGQGL |
| | | EWMGWFFPGSGNIKYNEKFKGRVTITADTSTST |
| | | AYMELSSLRSEDTAVYYCAGSYYSYDVLDYWG |
| | | QGTTVTVSSASTKGPSVFPLAPSSKSTSGGTAAL |
| | | GCLVKDYFPEPVTVSWNSGALTSGVHTFPAVLQ |
| | | SSGLYSLSSVVTVPSSSLGTQTYICNVNHKPSNT |
| | | KVDKRVEPKSCDKTHTCPPCPAPELLGGPSVFLF |
| | | PPKPKDTLMISRTPEVTCVVVDVSHEDPEVKFN |
| | | WYVDGVEVHNAKTKPREEQYNSTYRVVSVLTV |
| | | LHQDWLNGKEYKCKVSNKALPAPIEKTISKAKG |
| | | QPREPQVYTLPPSREEMTKNQVSLTCLVKGFYPS |
| | | DIAVEWESNGQPENNYKTTPPVLDSDGSFFLYSK |
| | | LTVDKSRWQQGNVFSCSVMHEALHNHYTQKSL |
| | | SLSPGK |
| SEQ ID NO: 6 | LC CDR1 (Combined) | KASQNVGINVV |
| SEQ ID NO: 7 | LC CDR2 (Combined) | SSSHRYS |
| SEQ ID NO: 8 | LC CDR3 (Combined) | QQFKSYPLT |
| SEQ ID NO: 10 | VL | DIQMTQSPSFLSASVGDRVTITCKASQNVGINVV |
| | | WHQQKPGKAPKALIYSSSHRYSGVPSRFSGSGS |
| | | GTEFTLTISSLQPEDFATYFCQQFKSYPLTFGQGT |
| | | KLEIK |
| SEQ ID NO: 13 | DNA VL | GACATCCAGATGACCCAGTCTCCATCCTTCCT |
| | | GTCCGCCTCTGTGGGCGACAGAGTGACCATCA |
| | | CATGCAAGGCCTCTCAGAACGTGGGCATCAAC |
| | | GTCGTGTGGCACCAGCAGAAGCCTGGCAAGG |
| | | CTCCTAAGGCTCTGATCTACTCCTCCAGCCACC |
| | | GGTACTCTGGCGTGCCCTCTAGATTTTCCGGCT |
| | | CTGGCTCTGGCACCGAGTTTACCCTGACAATC |
| | | TCCAGCCTGCAGCCTGAGGACTTCGCCACCTA |
| | | CTTTTGCCAGCAGTTCAAGAGCTACCCTCTGA |
| | | CCTTTGGCCAGGGCACCAAGCTGGAAATCAAG |
| SEQ ID NO: 72 | VL and kappa constant | METDTLLLWVLLLWVPGSTGDIQMTQSPSFLSA |
| | region/light chain | SVGDRVTITCKASQNVGINVVWHQQKPGKAPK |
| | | ALIYSSSHRYSGVPSRFSGSGSGTEFTLTISSLQPE |
| | | DFATYFCQQFKSYPLTFGQGTKLEIKRTVAAPSV |
| | | FIFPPSDEQLKSGTASVVCLLNNFYPREAKVQWK |
| | | VDNALQSGNSQESVTEQDSKDSTYSLSSTLTLSK |
| | | ADYEKHKVYACEVTHQGLSSPVTKSFNRGEC |

A-H.2 antibody

| | | |
|---|---|---|
| SEQ ID NO: 3 | HC CDR1 (Combined) | GYSFTTYYIH |
| SEQ ID NO: 4 | HC CDR2 (Combined) | WFFPGSGNIKYNEKFKG |
| SEQ ID NO: 5 | HC CDR3 (Combined) | SYYSYDVLDY |
| SEQ ID NO: 9 | VH | QVQLVQSGAEVKKPGSSVKVSCKASGYSFTTYY |
| | | IHWVRQAPGQGLEWMGWFFPGSGNIKYNEKFK |
| | | GRVTITADTSTSTAYMELSSLRSEDTAVYYCAGS |
| | | YYSYDVLDYWGQGTTVTVSS |
| SEQ ID NO: 12 | DNA VH | CAGGTGCAGCTGGTTCAGTCTGGCGCCGAAGT |
| | | GAAGAAACCTGGCTCCTCCGTGAAGGTGTCCT |
| | | GCAAGGCTTCCGGCTACTCCTTCACCACCTAC |
| | | TACATCCACTGGGTCCGACAGGCCCCTGGACA |
| | | AGGATTGGAATGGATGGGCTGGTTCTTCCCCG |
| | | GCTCCGGCAACATCAAGTACAACGAGAAGTTC |
| | | AAGGGCCGCGTGACCATCACCGCCGACACCTC |
| | | TACCTCTACCGCCTACATGGAACTGTCCAGCC |
| | | TGAGATCTGAGGACACCGCCGTGTACTACTGC |
| | | GCCGGCTCCTACTACTCTTACGACGTGCTGGA |
| | | TTACTGGGGCCAGGGCACCACAGTGACAGTGT |
| | | CCTCT |
| SEQ ID NO: | Heavy chain | METDTLLLWVLLLWVPGSTGQVQLVQSGAEVK |
| 3278 | | KPGSSVKVSCKASGYSFTTYYIHWVRQAPGQGL |
| | | EWMGWFFPGSGNIKYNEKFKGRVTITADTSTST |
| | | AYMELSSLRSEDTAVYYCAGSYYSYDVLDYWG |
| | | QGTTVTVSSASTKGPSVFPLAPSSKSTSGGTAAL |
| | | GCLVKDYFPEPVTVSWNSGALTSGVHTFPAVLQ |
| | | SSGLYSLSSVVTVPSSSLGTQTYICNVNHKPSNT |
| | | KVDKRVEPKSCDKTHTCPPCPAPELLGGPSVFLF |
| | | PPKPKDTLMISRTPEVTCVVVDVSHEDPEVKFN |
| | | WYVDGVEVHNAKTKPREEQYNSTYRVVSVLTV |
| | | LHQDWLNGKEYKCKVSNKALPAPIEKTISKAKG |
| | | QPREPQVYTLPPSREEMTKNQVSLTCLVKGFYPS |
| | | DIAVEWESNGQPENNYKTTPPVLDSDGSFFLYSK |
| | | LTVDKSRWQQGNVFSCSVMHEALHNHYTQKSL |
| | | SLSPGK |
| SEQ ID NO: 6 | LC CDR1 (Combined) | KASQNVGINVV |
| SEQ ID NO: 7 | LC CDR2 (Combined) | SSSHRYS |
| SEQ ID NO: 8 | LC CDR3 (Combined) | QQFKSYPLT |
| SEQ ID NO: 11 | VL | DIQMTQSPSSLSASVGDRVTITCKASQNVGINVV |
| | | WHQQKPGKVPKALIYSSSHRYSGVPSRFSGSGS |
| | | GTDFTLTISSLQPEDVATYFCQQFKSYPLTFGQG |
| | | TKLEIK |
| SEQ ID NO: 14 | DNA VL | GACATCCAGATGACCCAGTCTCCATCCTCTCT |
| | | GTCCGCCTCTGTGGGCGACAGAGTGACCATCA |
| | | CATGCAAGGCCTCTCAGAACGTGGGCATCAAC |
| | | GTCGTGTGGCACCAGCAGAAACCTGGCAAGGT |
| | | GCCCAAGGCTCTGATCTACTCCTCCAGCCACA |
| | | GATACTCCGGCGTGCCCTCTAGATTCTCCGGC |
| | | TCTGGCTCTGGCACCGACTTTACCCTGACAAT |
| | | CTCCAGCCTGCAGCCTGAGGACGTGGCCACCT |
| | | ACTTTTGCCAGCAGTTCAAGAGCTACCCTCTG |
| | | ACCTTTGGCCAGGGCACCAAGCTGGAAATCAA |
| | | G |
| SEQ ID NO: | Light chain | METDTLLLWVLLLWVPGSTGDIQMTQSPSSLSA |
| 3279 | | SVGDRVTITCKASQNVGINVVWHQQKPGKVPK |
| | | ALIYSSSHRYSGVPSRFSGSGSGTDFTLTISSLQPE |
| | | DVATYFCQQFKSYPLTFGQGTKLEIKRTVAAPSV |
| | | FIFPPSDEQLKSGTASVVCLLNNFYPREAKVQWK |
| | | VDNALQSGNSQESVTEQDSKDSTYSLSSTLTLSK |
| | | ADYEKHKVYACEVTHQGLSSPVTKSFNRGEC |

A-H.3 antibody

| | | |
|---|---|---|
| SEQ ID NO: 80 | VH + VL | QVQLVQSGAEVKKPGSSVKVSCKASGTDFKLTY |
| | | IHWVRQAPGQGLEWMGRVSPGSGNTKYNEKFK |
| | | GRVTITADTSTSTAYMELSSLRSEDTAVYYCAGS |
| | | YYSYDVLDYWGQGTTVTVSSGGGGSGGGGSGG |
| | | GGSGGGGSDIQMTQSPSFLSASVGDRVTITCKAS |
| | | QNVEDRVAWYQQKPGKAPKALIYSSSHRYKGV |
| | | PSRFSGSGSGTEFTLTISSLQPEDFATYFCQQFKS |
| | | YPLTFGQGTKLEIK |
| SEQ ID NO: 81 | VL | DIQMTQSPSFLSASVGDRVTITCKASQNVEDRVA |
| | | WYQQKPGKAPKALIYSSSHRYKGVPSRFSGSGS |
| | | GTEFTLTISSLQPEDFATYFCQQFKSYPLTFGQGT |
| | | KLEIK |
| SEQ ID NO: 82 | VH | QVQLVQSGAEVKKPGSSVKVSCKASGTDFKLTY |
| | | IHWVRQAPGQGLEWMGRVSPGSGNTKYNEKFK |
| | | GRVTITADTSTSTAYMELSSLRSEDTAVYYCAGS |
| | | YYSYDVLDYWGQGTTVTVSS |

A-H.4

| | | |
|---|---|---|
| SEQ ID NO: 83 | VH+VL | QVQLVQSGAEVKKPGSSVKVSCKASGTDFDKIY |
| | | IHWVRQAPGQGLEWMGRISAGSGNVKYNEKFK |
| | | GRVTITADTSTSTAYMELSSLRSEDTAVYYCAGS |
| | | YYSYDVLDYWGQGTTVTVSSGGGGSGGGGSGG |
| | | GGSGGGGSDIQMTQSPSFLSASVGDRVTITCKAS |
| | | QNVEDRVAWYQQKPGKAPKALIYSSSHRYKGV |
| | | PSRFSGSGSGTEFTLTISSLQPEDFATYFCQQFKS |
| | | YPLTFGQGTKLEIK |
| SEQ ID NO: 84 | VI | DIQMTQSPSFLSASVGDRVTITCKASQNVEDRVA |
| | | WYQQKPGKAPKALIYSSSHRYKGVPSRFSGSGS |
| | | GTEFTLTISSLQPEDFATYFCQQFKSYPLTFGQGT |
| | | KLEIK |
| SEQ ID NO: 85 | VH | QVQLVQSGAEVKKPGSSVKVSCKASGTDFDKIY |
| | | IHWVRQAPGQGLEWMGRISAGSGNVKYNEKFK |
| | | GRVTITADTSTSTAYMELSSLRSEDTAVYYCAGS |
| | | YYSYDVLDYWGQGTTVTVSS |

A-H.5

| | | |
|---|---|---|
| SEQ ID NO: 86 | VH+VL | QVQLVQSGAEVKKPGSSVKVSCKASGHDFRDF |
| | | YIHWVRQAPGQGLEWMGRVYPGSGSYRYNEKF |
| | | KGRVTITADTSTSTAYMELSSLRSEDTAVYYCA |
| | | GSYYSYDVLDYWGQGTTVTVSSGGGGSGGGGS |
| | | GGGGSGGGGSDIQMTQSPSFLSASVGDRVTITCK |
| | | ASQNVDDRVAWYQQKPGKAPKALIYSSSHRYK |
| | | GVPSRFSGSGSGTEFTLTISSLQPEDFATYFCQQF |
| | | KSYPLTFGQGTKLEIK |
| SEQ ID NO: 87 | VL | DIQMTQSPSFLSASVGDRVTITCKASQNVDDRV |
| | | AWYQQKPGKAPKALIYSSSHRYKGVPSRFSGSG |
| | | SGTEFTLTISSLQPEDFATYFCQQFKSYPLTFGQG |
| | | TKLEIK |
| SEQ ID NO: 88 | VH | QVQLVQSGAEVKKPGSSVKVSCKASGHDFRDF |
| | | YIHWVRQAPGQGLEWMGRVYPGSGSYRYNEKF |
| | | KGRVTITADTSTSTAYMELSSLRSEDTAVYYCA |
| | | GSYYSYDVLDYWGQGTTVTVSS |

A-H.6

| | | |
|---|---|---|
| SEQ ID NO: 89 | VH + VL | QVQLVQSGAEVKKPGSSVKVSCKASGHDFKLT |
| | | YIHWVRQAPGQGLEWMGRISAGSGNVKYNEKF |
| | | KGRVTITADTSTSTAYMELSSLRSEDTAVYYCA |
| | | GSYYSYDVLDYWGQGTTVTVSSGGGGSGGGGS |
| | | GGGGSGGGGSDIQMTQSPSFLSASVGDRVTITCK |
| | | ASQNVDNRVAWYQQKPGKAPKALIYSSSHRYK |
| | | GVPSRFSGSGSGTEFTLTISSLQPEDFATYFCQQF |
| | | KSYPLTFGQGTKLEIK |
| SEQ ID NO: 90 | VL | DIQMTQSPSFLSASVGDRVTITCKASQNVDNRV |
| | | AWYQQKPGKAPKALIYSSSHRYKGVPSRFSGSG |
| | | SGTEFTLTISSLQPEDFATYFCQQFKSYPLTFGQG |
| | | TKLEIK |
| SEQ ID NO: 91 | VH | QVQLVQSGAEVKKPGSSVKVSCKASGHDFKLT |
| | | YIHWVRQAPGQGLEWMGRISAGSGNVKYNEKF |
| | | KGRVTITADTSTSTAYMELSSLRSEDTAVYYCA |
| | | GSYYSYDVLDYWGQGTTVTVSS |

A-H.7

| | | |
|---|---|---|
| SEQ ID NO: 92 | VH + VL | QVQLVQSGAEVKKPGSSVKVSCKASGTDFKLTY |
| | | IHWVRQAPGQGLEWMGRIFPGSGNVKYNEKFK |
| | | GRVTITADTSTSTAYMELSSLRSEDTAVYYCAGS |
| | | YYSYDVLDYWGQGTTVTVSSGGGGSGGGGSGG |
| | | GGSGGGGSDIQMTQSPSFLSASVGDRVTITCKAS |
| | | QNVENKVAWHQQKPGKAPKALIYSSSHRYKGV |
| | | PSRFSGSGSGTEFTLTISSLQPEDFATYFCQQFKS |
| | | YPLTFGQGTKLEIK |
| SEQ ID NO: 93 | VL | DIQMTQSPSFLSASVGDRVTITCKASQNVENKVA |
| | | WHQQKPGKAPKALIYSSSHRYKGVPSRFSGSGS |
| | | GTEFTLTISSLQPEDFATYFCQQFKSYPLTFGQGT |
| | | KLEIK |
| SEQ ID NO: 94 | VH | QVQLVQSGAEVKKPGSSVKVSCKASGTDFKLTY |
| | | IHWVRQAPGQGLEWMGRIFPGSGNVKYNEKFK |
| | | GRVTITADTSTSTAYMELSSLRSEDTAVYYCAGS |
| | | YYSYDVLDYWGQGTTVTVSS |

A-H.8

| | | |
|---|---|---|
| SEQ ID NO: 95 | VH + VL | QVQLVQSGAEVKKPGSSVKVSCKASGTDFDKIY |
| | | IHWVRQAPGQGLEWMGRIFAGSGNTKYNEKFK |
| | | GRVTITADTSTSTAYMELSSLRSEDTAVYYCAGS |
| | | YYSYDVLDYWGQGTTVTVSSGGGGSGGGGSGG |
| | | GGSGGGGSDIQMTQSPSFLSASVGDRVTITCKAS |
| | | QNVDDRVAWYQQKPGKAPKALIYSSSHRYKGV |
| | | PSRFSGSGSGTEFTLTISSLQPEDFATYFCQQFKS |
| | | YPLTFGQGTKLEIK |
| SEQ ID NO: 96 | VL | DIQMTQSPSFLSASVGDRVTITCKASQNVDDRV |
| | | AWYQQKPGKAPKALIYSSSHRYKGVPSRFSGSG |
| | | SGTEFTLTISSLQPEDFATYFCQQFKSYPLTFGQG |
| | | TKLEIK |
| SEQ ID NO: 97 | VH | QVQLVQSGAEVKKPGSSVKVSCKASGTDFDKIY |
| | | IHWVRQAPGQGLEWMGRIFAGSGNTKYNEKFK |
| | | GRVTITADTSTSTAYMELSSLRSEDTAVYYCAGS |
| | | YYSYDVLDYWGQGTTVTVSS |

A-H.9

| | | |
|---|---|---|
| SEQ ID NO: 98 | VH + VL | QVQLVQSGAEVKKPGSSVKVSCKASGHDFDKF |
| | | YIHWVRQAPGQGLEWMGRVSAGSGNVKYNEK |
| | | FKGRVTITADTSTSTAYMELSSLRSEDTAVYYCA |
| | | GSYYSYDVLDYWGQGTTVTVSSGGGGSGGGGS |
| | | GGGGSGGGGSDIQMTQSPSFLSASVGDRVTITCK |
| | | ASQNVGNRVAWYQQKPGKAPKALIYSSSHRYS |
| | | GVPSRFSGSGSGTEFTLTISSLQPEDFATYFCQQF |
| | | KSYPLTFGQGTKLEIK |
| SEQ ID NO: 99 | VL | DIQMTQSPSFLSASVGDRVTITCKASQNVGNRV |
| | | AWYQQKPGKAPKALIYSSSHRYSGVPSRFSGSG |
| | | SGTEFTLTISSLQPEDFATYFCQQFKSYPLTFGQG |
| | | TKLEIK |
| SEQ ID NO: 100 | VH | QVQLVQSGAEVKKPGSSVKVSCKASGHDFDKF |
| | | YIHWVRQAPGQGLEWMGRVSAGSGNVKYNEK |
| | | FKGRVTITADTSTSTAYMELSSLRSEDTAVYYCA |
| | | GSYYSYDVLDYWGQGTTVTVSS |

A-H.10

| | | |
|---|---|---|
| SEQ ID NO: 101 | VH + VL | QVQLVQSGAEVKKPGSSVKVSCKASGHDFDKF |
| | | YIHWVRQAPGQGLEWMGRIFAGSGNVKYNEKF |
| | | KGRVTITADTSTSTAYMELSSLRSEDTAVYYCA |
| | | GSYYSYDVLDYWGQGTTVTVSSGGGGSGGGGS |
| | | GGGGSGGGGSDIQMTQSPSFLSASVGDRVTITCK |
| | | ASQNVGDRVAWYQQKPGKAPKALIYSSSHRYK |
| | | GVPSRFSGSGSGTEFTLTISSLQPEDFATYFCQQF |
| | | KSYPLTFGQGTKLEIKs |
| SEQ ID NO: 102 | VL | DIQMTQSPSFLSASVGDRVTITCKASQNVGDRV |
| | | AWYQQKPGKAPKALIYSSSHRYKGVPSRFSGSG |
| | | SGTEFTLTISSLQPEDFATYFCQQFKSYPLTFGQG |
| | | TKLEIK |
| SEQ ID NO: 103 | VH | QVQLVQSGAEVKKPGSSVKVSCKASGHDFDKF |
| | | YIHWVRQAPGQGLEWMGRIFAGSGNVKYNEKF |
| | | KGRVTITADTSTSTAYMELSSLRSEDTAVYYCA |
| | | GSYYSYDVLDYWGQGTTVTVSS |

A-H.11

| | | |
|---|---|---|
| SEQ ID NO: 104 | VH + VL | QVQLVQSGAEVKKPGSSVKVSCKASGTDFKLTY |
| | | IHWVRQAPGQGLEWMGRVSPGSGNVKYNEKFK |
| | | GRVTITADTSTSTAYMELSSLRSEDTAVYYCAGS |
| | | YYSYDVLDYWGQGTTVTVSSGGGGSGGGGSGG |
| | | GGSGGGGSDIQMTQSPSFLSASVGDRVTITCKAS |
| | | QNVGDRVAWYQQKPGKAPKALIYSSSHRYKGV |
| | | PSRFSGSGSGTEFTLTISSLQPEDFATYFCQQFKS |
| | | YPLTFGQGTKLEIK |
| SEQ ID NO: 105 | VL | DIQMTQSPSFLSASVGDRVTITCKASQNVGDRV |
| | | AWYQQKPGKAPKALIYSSSHRYKGVPSRFSGSG |
| | | SGTEFTLTISSLQPEDFATYFCQQFKSYPLTFGQG |
| | | TKLEIK |
| SEQ ID NO: 106 | VH | QVQLVQSGAEVKKPGSSVKVSCKASGTDFKLTY |
| | | IHWVRQAPGQGLEWMGRVSPGSGNVKYNEKFK |
| | | GRVTITADTSTSTAYMELSSLRSEDTAVYYCAGS |
| | | YYSYDVLDYWGQGTTVTVSS |

A-H.12

| | | |
|---|---|---|
| SEQ ID NO: 107 | VH + VL | QVQLVQSGAEVKKPGSSVKVSCKASGTDFDKIY |
| | | IHWVRQAPGQGLEWMGRVSAGSGNTKYNEKFK |
| | | GRVTITADTSTSTAYMELSSLRSEDTAVYYCAGS |
| | | YYSYDVLDYWGQGTTVTVSSGGGGSGGGGSGG |
| | | GGSGGGGSDIQMTQSPSFLSASVGDRVTITCKAS |
| | | QNVGNRVAWYQQKPGKAPKALIYSSSHRYKGV |
| | | PSRFSGSGSGTEFTLTISSLQPEDFATYFCQQFKS |
| | | YPLTFGQGTKLEIK |
| SEQ ID NO: 108 | VL | DIQMTQSPSFLSASVGDRVTITCKASQNVGNRV |
| | | AWYQQKPGKAPKALIYSSSHRYKGVPSRFSGSG |
| | | SGTEFTLTISSLQPEDFATYFCQQFKSYPLTFGQG |
| | | TKLEIK |
| SEQ ID NO: 109 | VH | QVQLVQSGAEVKKPGSSVKVSCKASGTDFDKIY |
| | | IHWVRQAPGQGLEWMGRVSAGSGNTKYNEKFK |
| | | GRVTITADTSTSTAYMELSSLRSEDTAVYYCAGS |
| | | YYSYDVLDYWGQGTTVTVSS |

A-H.13 (also referred to as A-H.69)

| | | |
|---|---|---|
| SEQ ID NO: 110 | VH + VL | QVQLVQSGAEVKKPGSSVKVSCKASGTDFKLTY |
| | | IHWVRQAPGQGLEWMGRIFPGSGNVKYNEKFK |
| | | GRVTITADTSTSTAYMELSSLRSEDTAVYYCAGS |
| | | YYSYDVLDYWGQGTTVTVSSGGGGSGGGGSGG |
| | | GGSGGGGSDIQMTQSPSFLSASVGDRVTITCKAS |
| | | QNVDNRVAWYQQKPGKAPKALIYSSSHRYKGV |
| | | PSRFSGSGSGTEFTLTISSLQPEDFATYFCQQFKS |
| | | YPLTFGQGTKLEIK |
| SEQ ID NO: 111 | VL | DIQMTQSPSFLSASVGDRVTITCKASQNVDNRV |
| | | AWYQQKPGKAPKALIYSSSHRYKGVPSRFSGSG |
| | | SGTEFTLTISSLQPEDFATYFCQQFKSYPLTFGQG |
| | | TKLEIK |
| SEQ ID NO: 112 | VH | QVQLVQSGAEVKKPGSSVKVSCKASGTDFKLTY |
| | | IHWVRQAPGQGLEWMGRIFPGSGNVKYNEKFK |
| | | GRVTITADTSTSTAYMELSSLRSEDTAVYYCAGS |
| | | YYSYDVLDYWGQGTTVTVSS |

A-H.14

| | | |
|---|---|---|
| SEQ ID NO: 113 | VH + VL | QVQLVQSGAEVKKPGSSVKVSCKASGTDFDKIY |
| | | IHWVRQAPGQGLEWMGRISAGSGNTKYNEKFK |
| | | GRVTITADTSTSTAYMELSSLRSEDTAVYYCAGS |
| | | YYSYDVLDYWGQGTTVTVSSGGGGSGGGGSGG |
| | | GGSGGGGSDIQMTQSPSFLSASVGDRVTITCKAS |
| | | QNVDDRVAWYQQKPGKAPKALIYSSSHRYKGV |
| | | PSRFSGSGSGTEFTLTISSLQPEDFATYFCQQFKS |
| | | YPLTFGQGTKLEIK |
| SEQ ID NO: 114 | VL | DIQMTQSPSFLSASVGDRVTITCKASQNVDDRV |
| | | AWYQQKPGKAPKALIYSSSHRYKGVPSRFSGSG |
| | | SGTEFTLTISSLQPEDFATYFCQQFKSYPLTFGQG |
| | | TKLEIK |
| SEQ ID NO: 115 | VH | QVQLVQSGAEVKKPGSSVKVSCKASGTDFDKIY |
| | | IHWVRQAPGQGLEWMGRISAGSGNTKYNEKFK |
| | | GRVTITADTSTSTAYMELSSLRSEDTAVYYCAGS |
| | | YYSYDVLDYWGQGTTVTVSS |

A-H.15

| | | |
|---|---|---|
| SEQ ID NO: 116 | VH + VL | QVQLVQSGAEVKKPGSSVKVSCKASGTDFRLTY |
| | | IHWVRQAPGQGLEWMGRVSPGSGNTKYNEKFK |
| | | GRVTITADTSTSTAYMELSSLRSEDTAVYYCAGS |
| | | YYSYDVLDYWGQGTTVTVSSGGGGSGGGGSGG |
| | | GGSGGGGSDIQMTQSPSFLSASVGDRVTITCKAS |
| | | QNVDNKVAWHQQKPGKAPKALIYSSSHRYKGV |
| | | PSRFSGSGSGTEFTLTISSLQPEDFATYFCQQFKS |
| | | YPLTFGQGTKLEIK |
| SEQ ID NO: 117 | VL | DIQMTQSPSFLSASVGDRVTITCKASQNVDNKV |
| | | AWHQQKPGKAPKALIYSSSHRYKGVPSRFSGSG |
| | | SGTEFTLTISSLQPEDFATYFCQQFKSYPLTFGQG |
| | | TKLEIK |
| SEQ ID NO: 118 | VH | QVQLVQSGAEVKKPGSSVKVSCKASGTDFRLTY |
| | | IHWVRQAPGQGLEWMGRVSPGSGNTKYNEKFK |
| | | GRVTITADTSTSTAYMELSSLRSEDTAVYYCAGS |
| | | YYSYDVLDYWGQGTTVTVSS |

A-H.16

| | | |
|---|---|---|
| SEQ ID NO: 119 | VH + VL | QVQLVQSGAEVKKPGSSVKVSCKASGGTFRLTY |
| | | IHWVRQAPGQGLEWMGRVYPGSGNTKYNEKFK |
| | | GRVTITADTSTSTAYMELSSLRSEDTAVYYCAGS |
| | | YYSYDVLDYWGQGTTVTVSSGGGGSGGGGSGG |
| | | GGSGGGGSDIQMTQSPSFLSASVGDRVTITCKAS |
| | | QNVDDRVAWYQQKPGKAPKALIYSSSHRYKGV |
| | | PSRFSGSGSGTEFTLTISSLQPEDFATYFCQQFKS |
| | | YPLTFGQGTKLEIK |
| SEQ ID NO: 120 | VL | DIQMTQSPSFLSASVGDRVTITCKASQNVDDRV |
| | | AWYQQKPGKAPKALIYSSSHRYKGVPSRFSGSG |
| | | SGTEFTLTISSLQPEDFATYFCQQFKSYPLTFGQG |
| | | TKLEIK |
| SEQ ID NO: 121 | VH | QVQLVQSGAEVKKPGSSVKVSCKASGGTFRLTY |
| | | IHWVRQAPGQGLEWMGRVYPGSGNTKYNEKFK |
| | | GRVTITADTSTSTAYMELSSLRSEDTAVYYCAGS |
| | | YYSYDVLDYWGQGTTVTVSS |

A-H.17

| | | |
|---|---|---|
| SEQ ID NO: 122 | VH+VL | QVQLVQSGAEVKKPGSSVKVSCKASGTDFRLTY |
| | | IHWVRQAPGQGLEWMGRIFPGSGNTKYNEKFK |
| | | GRVTITADTSTSTAYMELSSLRSEDTAVYYCAGS |
| | | YYSYDVLDYWGQGTTVTVSSGGGGSGGGGSGG |
| | | GGSGGGGSDIQMTQSPSFLSASVGDRVTITCKAS |
| | | QNVDDRVAWYQQKPGKAPKALIYSSSHRYKGV |
| | | PSRFSGSGSGTEFTLTISSLQPEDFATYFCQQFKS |
| | | YPLTFGQGTKLEIK |
| SEQ ID NO: 123 | VL | DIQMTQSPSFLSASVGDRVTITCKASQNVDDRV |
| | | AWYQQKPGKAPKALIYSSSHRYKGVPSRFSGSG |
| | | SGTEFTLTISSLQPEDFATYFCQQFKSYPLTFGQG |
| | | TKLEIK |
| SEQ ID NO: 124 | VH | QVQLVQSGAEVKKPGSSVKVSCKASGTDFRLTY |
| | | IHWVRQAPGQGLEWMGRIFPGSGNTKYNEKFK |
| | | GRVTITADTSTSTAYMELSSLRSEDTAVYYCAGS |
| | | YYSYDVLDYWGQGTTVTVSS |

A-H.18

| | | |
|---|---|---|
| SEQ ID NO: 125 | VH + VL | QVQLVQSGAEVKKPGSSVKVSCKASGTDFKLTY |
| | | IHWVRQAPGQGLEWMGRIFPGSGNVKYNEKFK |
| | | GRVTITADTSTSTAYMELSSLRSEDTAVYYCAGS |
| | | YYSYDVLDYWGQGTTVTVSSGGGGSGGGGSGG |
| | | GGSGGGGSDIQMTQSPSFLSASVGDRVTITCKAS |
| | | QNVEDRVAWYQQKPGKAPKALIYSSSHRYKGV |
| | | PSRFSGSGSGTEFTLTISSLQPEDFATYFCQQFKS |
| | | YPLTFGQGTKLEIK |
| SEQ ID NO: 126 | VL | DIQMTQSPSFLSASVGDRVTITCKASQNVEDRVA |
| | | WYQQKPGKAPKALIYSSSHRYKGVPSRFSGSGS |
| | | GTEFTLTISSLQPEDFATYFCQQFKSYPLTFGQGT |
| | | KLEIK |
| SEQ ID NO: 127 | VH | QVQLVQSGAEVKKPGSSVKVSCKASGTDFKLTY |
| | | IHWVRQAPGQGLEWMGRIFPGSGNVKYNEKFK |
| | | GRVTITADTSTSTAYMELSSLRSEDTAVYYCAGS |
| | | YYSYDVLDYWGQGTTVTVSS |

A-H.19

| | | |
|---|---|---|
| SEQ ID NO: 128 | VH + VL | QVQLVQSGAEVKKPGSSVKVSCKASGGTFRLTY |
| | | IHWVRQAPGQGLEWMGRISAGSGNVKYNEKFK |
| | | GRVTITADTSTSTAYMELSSLRSEDTAVYYCAGS |
| | | YYSYDVLDYWGQGTTVTVSSGGGGSGGGGSGG |
| | | GGSGGGGSDIQMTQSPSFLSASVGDRVTITCKAS |
| | | QNVGDRVAWYQQKPGKAPKALIYSSSHRYKGV |
| | | PSRFSGSGSGTEFTLTISSLQPEDFATYFCQQFKS |
| | | YPLTFGQGTKLEIK |
| SEQ ID NO: 129 | VL | DIQMTQSPSFLSASVGDRVTITCKASQNVGDRV |
| | | AWYQQKPGKAPKALIYSSSHRYKGVPSRFSGSG |
| | | SGTEFTLTISSLQPEDFATYFCQQFKSYPLTFGQG |
| | | TKLEIK |
| SEQ ID NO: 130 | VH | QVQLVQSGAEVKKPGSSVKVSCKASGGTFRLTY |
| | | IHWVRQAPGQGLEWMGRISAGSGNVKYNEKFK |
| | | GRVTITADTSTSTAYMELSSLRSEDTAVYYCAGS |
| | | YYSYDVLDYWGQGTTVTVSS |

A-H.20

| | | |
|---|---|---|
| SEQ ID NO: 131 | VH + VL | QVQLVQSGAEVKKPGSSVKVSCKASGGTFDKT |
| | | YIHWVRQAPGQGLEWMGRISAGSGNTKYNEKF |
| | | KGRVTITADTSTSTAYMELSSLRSEDTAVYYCA |
| | | GSYYSYDVLDYWGQGTTVTVSSGGGGSGGGGS |
| | | GGGGSGGGGSDIQMTQSPSFLSASVGDRVTITCK |
| | | ASQNVDDRVAWYQQKPGKAPKALIYSSSHRYK |
| | | GVPSRFSGSGSGTEFTLTISSLQPEDFATYFCQQF |
| | | KSYPLTFGQGTKLEIK |
| SEQ ID NO: 132 | VL | DIQMTQSPSFLSASVGDRVTITCKASQNVDDRV |
| | | AWYQQKPGKAPKALIYSSSHRYKGVPSRFSGSG |
| | | SGTEFTLTISSLQPEDFATYFCQQFKSYPLTFGQG |
| | | TKLEIK |
| SEQ ID NO: 133 | VH | QVQLVQSGAEVKKPGSSVKVSCKASGGTFDKT |
| | | YIHWVRQAPGQGLEWMGRISAGSGNTKYNEKF |
| | | KGRVTITADTSTSTAYMELSSLRSEDTAVYYCA |
| | | GSYYSYDVLDYWGQGTTVTVSS |

A-H.21

| | | |
|---|---|---|
| SEQ ID NO: 134 | VH + VL | QVQLVQSGAEVKKPGSSVKVSCKASGHDFDKF |
| | | YIHWVRQAPGQGLEWMGRISAGSGNTKYNEKF |
| | | KGRVTITADTSTSTAYMELSSLRSEDTAVYYCA |
| | | GSYYSYDVLDYWGQGTTVTVSSGGGGSGGGGS |
| | | GGGGSGGGGSDIQMTQSPSFLSASVGDRVTITCK |
| | | ASQNVDDRVAWYQQKPGKAPKALIYSSSHRYK |
| | | GVPSRFSGSGSGTEFTLTISSLQPEDFATYFCQQF |
| | | KSYPLTFGQGTKLEIK |
| SEQ ID NO: 135 | VL | DIQMTQSPSFLSASVGDRVTITCKASQNVDDRV |
| | | AWYQQKPGKAPKALIYSSSHRYKGVPSRFSGSG |
| | | SGTEFTLTISSLQPEDFATYFCQQFKSYPLTFGQG |
| | | TKLEIK |
| SEQ ID NO: 136 | VH | QVQLVQSGAEVKKPGSSVKVSCKASGHDFDKF |
| | | YIHWVRQAPGQGLEWMGRISAGSGNTKYNEKF |
| | | KGRVTITADTSTSTAYMELSSLRSEDTAVYYCA |
| | | GSYYSYDVLDYWGQGTTVTVSS |

A-H.22

| | | |
|---|---|---|
| SEQ ID NO: 137 | VH + VL | QVQLVQSGAEVKKPGSSVKVSCKASGTDFKLTY |
| | | IHWVRQAPGQGLEWMGRISAGSGNVKYNEKFK |
| | | GRVTITADTSTSTAYMELSSLRSEDTAVYYCAGS |
| | | YYSYDVLDYWGQGTTVTVSSGGGGSGGGGSGG |
| | | GGSGGGGSDIQMTQSPSFLSASVGDRVTITCKAS |
| | | QNVDNKVAWHQQKPGKAPKALIYSSSHRYKGV |
| | | PSRFSGSGSGTEFTLTISSLQPEDFATYFCQQFKS |
| | | YPLTFGQGTKLEIK |
| SEQ ID NO: 138 | VL | DIQMTQSPSFLSASVGDRVTITCKASQNVDNKV |
| | | AWHQQKPGKAPKALIYSSSHRYKGVPSRFSGSG |
| | | SGTEFTLTISSLQPEDFATYFCQQFKSYPLTFGQG |
| | | TKLEIK |
| SEQ ID NO: 139 | VH | QVQLVQSGAEVKKPGSSVKVSCKASGTDFKLTY |
| | | IHWVRQAPGQGLEWMGRISAGSGNVKYNEKFK |
| | | GRVTITADTSTSTAYMELSSLRSEDTAVYYCAGS |
| | | YYSYDVLDYWGQGTTVTVSS |

A-H.23

| | | |
|---|---|---|
| SEQ ID NO: 140 | VH + VL | QVQLVQSGAEVKKPGSSVKVSCKASGHDFRLTY |
| | | IHWVRQAPGQGLEWMGRISAGSGNVKYNEKFK |
| | | GRVTITADTSTSTAYMELSSLRSEDTAVYYCAGS |
| | | YYSYDVLDYWGQGTTVTVSSGGGGSGGGGSGG |
| | | GGSGGGGSDIQMTQSPSFLSASVGDRVTITCKAS |
| | | QNVADRVAWYQQKPGKAPKALIYSSSHRYKGV |
| | | PSRFSGSGSGTEFTLTISSLQPEDFATYFCQQFKS |
| | | YPLTFGQGTKLEIK |
| SEQ ID NO: 141 | VL | DIQMTQSPSFLSASVGDRVTITCKASQNVADRV |
| | | AWYQQKPGKAPKALIYSSSHRYKGVPSRFSGSG |
| | | SGTEFTLTISSLQPEDFATYFCQQFKSYPLTFGQG |
| | | TKLEIK |
| SEQ ID NO: 142 | VH | QVQLVQSGAEVKKPGSSVKVSCKASGHDFRLTY |
| | | IHWVRQAPGQGLEWMGRISAGSGNVKYNEKFK |
| | | GRVTITADTSTSTAYMELSSLRSEDTAVYYCAGS |
| | | YYSYDVLDYWGQGTTVTVSS |

A-H.24

| | | |
|---|---|---|
| SEQ ID NO: 143 | VH + VL | QVQLVQSGAEVKKPGSSVKVSCKASGHDFHLW |
| | | YIHWVRQAPGQGLEWMGRVSAGSGNVKYNEK |
| | | FKGRVTITADTSTSTAYMELSSLRSEDTAVYYCA |
| | | GSYYSYDVLDYWGQGTTVTVSSGGGGSGGGGS |
| | | GGGGSGGGGSDIQMTQSPSFLSASVGDRVTITCK |
| | | ASQNVDNKVAWHQQKPGKAPKALIYSSSHRYK |
| | | GVPSRFSGSGSGTEFTLTISSLQPEDFATYFCQQF |
| | | KSYPLTFGQGTKLEIK |
| SEQ ID NO: 144 | VL | DIQMTQSPSFLSASVGDRVTITCKASQNVDNKV |
| | | AWHQQKPGKAPKALIYSSSHRYKGVPSRFSGSG |
| | | SGTEFTLTISSLQPEDFATYFCQQFKSYPLTFGQG |
| | | TKLEIK |
| SEQ ID NO: 145 | VH | QVQLVQSGAEVKKPGSSVKVSCKASGHDFHLW |
| | | YIHWVRQAPGQGLEWMGRVSAGSGNVKYNEK |
| | | FKGRVTITADTSTSTAYMELSSLRSEDTAVYYCA |
| | | GSYYSYDVLDYWGQGTTVTVSS |

A-H.25

| | | |
|---|---|---|
| SEQ ID NO: 146 | VH + VL | QVQLVQSGAEVKKPGSSVKVSCKASGHDFHLW |
| | | YIHWVRQAPGQGLEWMGRVFAGSGNTKYNEKF |
| | | KGRVTITADTSTSTAYMELSSLRSEDTAVYYCA |
| | | GSYYSYDVLDYWGQGTTVTVSSGGGGSGGGGS |
| | | GGGGSGGGGSDIQMTQSPSFLSASVGDRVTITCK |
| | | ASQNVEDKVAWYQQKPGKAPKALIYSSSHRYK |
| | | GVPSRFSGSGSGTEFTLTISSLQPEDFATYFCQQF |
| | | KSYPLTFGQGTKLEIK |
| SEQ ID NO: 147 | VL | DIQMTQSPSFLSASVGDRVTITCKASQNVEDKVA |
| | | WYQQKPGKAPKALIYSSSHRYKGVPSRFSGSGS |
| | | GTEFTLTISSLQPEDFATYFCQQFKSYPLTFGQGT |
| | | KLEIK |
| SEQ ID NO: 148 | VH | QVQLVQSGAEVKKPGSSVKVSCKASGHDFHLW |
| | | YIHWVRQAPGQGLEWMGRVFAGSGNTKYNEKF |
| | | KGRVTITADTSTSTAYMELSSLRSEDTAVYYCA |
| | | GSYYSYDVLDYWGQGTTVTVSS |

A-H.26

| | | |
|---|---|---|
| SEQ ID NO: 149 | VH + VL | QVQLVQSGAEVKKPGSSVKVSCKASGTDFKLTY |
| | | IHWVRQAPGQGLEWMGRIFPGSGNTKYNEKFK |
| | | GRVTITADTSTSTAYMELSSLRSEDTAVYYCAGS |
| | | YYSYDVLDYWGQGTTVTVSSGGGGSGGGGSGG |
| | | GGSGGGGSDIQMTQSPSFLSASVGDRVTITCKAS |
| | | QNVDDRVAWYQQKPGKAPKALIYSSSHRYKGV |
| | | PSRFSGSGSGTEFTLTISSLQPEDFATYFCQQFKS |
| | | YPLTFGQGTKLEIK |
| SEQ ID NO: 150 | VL | DIQMTQSPSFLSASVGDRVTITCKASQNVDDRV |
| | | AWYQQKPGKAPKALIYSSSHRYKGVPSRFSGSG |
| | | SGTEFTLTISSLQPEDFATYFCQQFKSYPLTFGQG |
| | | TKLEIK |
| SEQ ID NO: 151 | VH | QVQLVQSGAEVKKPGSSVKVSCKASGTDFKLTY |
| | | IHWVRQAPGQGLEWMGRIFPGSGNTKYNEKFK |
| | | GRVTITADTSTSTAYMELSSLRSEDTAVYYCAGS |
| | | YYSYDVLDYWGQGTTVTVSS |

A-H.27

| | | |
|---|---|---|
| SEQ ID NO: 153 | VH + VL | QVQLVQSGAEVKKPGSSVKVSCKASGTDFKLTY |
| | | IHWVRQAPGQGLEWMGRVSAGSGNVKYNEKF |
| | | KGRVTITADTSTSTAYMELSSLRSEDTAVYYCA |
| | | GSYYSYDVLDYWGQGTTVTVSSGGGGSGGGGS |
| | | GGGGSGGGGSDIQMTQSPSFLSASVGDRVTITCK |
| | | ASQNVGNRVAWYQQKPGKAPKALIYSSSHRYK |
| | | GVPSRFSGSGSGTEFTLTISSLQPEDFATYFCQQF |
| | | KSYPLTFGQGTKLEIK |
| SEQ ID NO: 154 | VL | DIQMTQSPSFLSASVGDRVTITCKASQNVGNRV |
| | | AWYQQKPGKAPKALIYSSSHRYKGVPSRFSGSG |
| | | SGTEFTLTISSLQPEDFATYFCQQFKSYPLTFGQG |
| | | TKLEIK |
| SEQ ID NO: 155 | VH | QVQLVQSGAEVKKPGSSVKVSCKASGTDFKLTY |
| | | IHWVRQAPGQGLEWMGRVSAGSGNVKYNEKF |
| | | KGRVTITADTSTSTAYMELSSLRSEDTAVYYCA |
| | | GSYYSYDVLDYWGQGTTVTVSS |

A-H.28

| | | |
|---|---|---|
| SEQ ID NO: 156 | VH + VL | QVQLVQSGAEVKKPGSSVKVSCKASGTDFKLTY |
| | | IHWVRQAPGQGLEWMGRISPGSGNTKYNEKFK |
| | | GRVTITADTSTSTAYMELSSLRSEDTAVYYCAGS |
| | | YYSYDVLDYWGQGTTVTVSSGGGGSGGGGSGG |
| | | GGSGGGGSDIQMTQSPSFLSASVGDRVTITCKAS |
| | | QNVGDRVAWYQQKPGKAPKALIYSSSHRYKGV |
| | | PSRFSGSGSGTEFTLTISSLQPEDFATYFCQQFKS |
| | | YPLTFGQGTKLEIK |
| SEQ ID NO: 157 | VL | DIQMTQSPSFLSASVGDRVTITCKASQNVGDRV |
| | | AWYQQKPGKAPKALIYSSSHRYKGVPSRFSGSG |
| | | SGTEFTLTISSLQPEDFATYFCQQFKSYPLTFGQG |
| | | TKLEIK |
| SEQ ID NO: 158 | VH | QVQLVQSGAEVKKPGSSVKVSCKASGTDFKLTY |
| | | IHWVRQAPGQGLEWMGRISPGSGNTKYNEKFK |
| | | GRVTITADTSTSTAYMELSSLRSEDTAVYYCAGS |
| | | YYSYDVLDYWGQGTTVTVSS |

A-H.29

| | | |
|---|---|---|
| SEQ ID NO: 159 | VH + VL | QVQLVQSGAEVKKPGSSVKVSCKASGHDFHLW |
| | | YIHWVRQAPGQGLEWMGRISPGSGNVKYNEKF |
| | | KGRVTITADTSTSTAYMELSSLRSEDTAVYYCA |
| | | GSYYSYDVLDYWGQGTTVTVSSGGGGSGGGGS |
| | | GGGGSGGGGSDIQMTQSPSFLSASVGDRVTITCK |
| | | ASQNVGDRVAWHQQKPGKAPKALIYSSSHRYK |
| | | GVPSRFSGSGSGTEFTLTISSLQPEDFATYFCQQF |
| | | KSYPLTFGQGTKLEIK |
| SEQ ID NO: 160 | VL | DIQMTQSPSFLSASVGDRVTITCKASQNVGDRV |
| | | AWHQQKPGKAPKALIYSSSHRYKGVPSRFSGSG |
| | | SGTEFTLTISSLQPEDFATYFCQQFKSYPLTFGQG |
| | | TKLEIK |
| SEQ ID NO: 161 | VH | QVQLVQSGAEVKKPGSSVKVSCKASGHDFHLW |
| | | YIHWVRQAPGQGLEWMGRISPGSGNVKYNEKF |
| | | KGRVTITADTSTSTAYMELSSLRSEDTAVYYCA |
| | | GSYYSYDVLDYWGQGTTVTVSS |

A-H.31

| | | |
|---|---|---|
| SEQ ID NO: 162 | VH + VL | QVQLVQSGAEVKKPGSSVKVSCKASGHDFKLT |
| | | YIHWVRQAPGQGLEWMGRISAGSGNVKYNEKF |
| | | KGRVTITADTSTSTAYMELSSLRSEDTAVYYCA |
| | | GSYYSYDVLDYWGQGTTVTVSSGGGGSGGGGS |
| | | GGGGSGGGGSDIQMTQSPSFLSASVGDRVTITCK |
| | | ASQNVDDRVAWYQQKPGKAPKALIYSSSHRYK |
| | | GVPSRFSGSGSGTEFTLTISSLQPEDFATYFCQQF |
| | | KSYPLTFGQGTKLEIK |
| SEQ ID NO: 163 | VL | DIQMTQSPSFLSASVGDRVTITCKASQNVDDRV |
| | | AWYQQKPGKAPKALIYSSSHRYKGVPSRFSGSG |
| | | SGTEFTLTISSLQPEDFATYFCQQFKSYPLTFGQG |
| | | TKLEIK |
| SEQ ID NO: 164 | VH | QVQLVQSGAEVKKPGSSVKVSCKASGHDFKLT |
| | | YIHWVRQAPGQGLEWMGRISAGSGNVKYNEKF |
| | | KGRVTITADTSTSTAYMELSSLRSEDTAVYYCA |
| | | GSYYSYDVLDYWGQGTTVTVSS |

A-H.31

| | | |
|---|---|---|
| SEQ ID NO: 165 | VH + VL | QVQLVQSGAEVKKPGSSVKVSCKASGTDFHLW |
| | | YIHWVRQAPGQGLEWMGRVFAGSGSYRYNEKF |
| | | KGRVTITADTSTSTAYMELSSLRSEDTAVYYCA |
| | | GSYYSYDVLDYWGQGTTVTVSSGGGGSGGGGS |
| | | GGGGSGGGGSDIQMTQSPSFLSASVGDRVTITCK |
| | | ASQNVDDRVAWYQQKPGKAPKALIYSSSHRYK |
| | | GVPSRFSGSGSGTEFTLTISSLQPEDFATYFCQQF |
| | | KSYPLTFGQGTKLEIK |
| SEQ ID NO: 166 | VL | DIQMTQSPSFLSASVGDRVTITCKASQNVDDRV |
| | | AWYQQKPGKAPKALIYSSSHRYKGVPSRFSGSG |
| | | SGTEFTLTISSLQPEDFATYFCQQFKSYPLTFGQG |
| | | TKLEIK |
| SEQ ID NO: 167 | VH | QVQLVQSGAEVKKPGSSVKVSCKASGTDFHLW |
| | | YIHWVRQAPGQGLEWMGRVFAGSGSYRYNEKF |
| | | KGRVTITADTSTSTAYMELSSLRSEDTAVYYCA |
| | | GSYYSYDVLDYWGQGTTVTVSS |

A-H.32

| | | |
|---|---|---|
| SEQ ID NO: 168 | VH + VL | QVQLVQSGAEVKKPGSSVKVSCKASGTDFDKIY |
| | | IHWVRQAPGQGLEWMGRISAGSGNTKYNEKFK |
| | | GRVTITADTSTSTAYMELSSLRSEDTAVYYCAGS |
| | | YYSYDVLDYWGQGTTVTVSSGGGGSGGGGSGG |
| | | GGSGGGGSDIQMTQSPSFLSASVGDRVTITCKAS |
| | | QNVADRVAWYQQKPGKAPKALIYSSSHRYKGV |
| | | PSRFSGSGSGTEFTLTISSLQPEDFATYFCQQFKS |
| | | YPLTFGQGTKLEIK |
| SEQ ID NO: 169 | VL | DIQMTQSPSFLSASVGDRVTITCKASQNVADRV |
| | | AWYQQKPGKAPKALIYSSSHRYKGVPSRFSGSG |
| | | SGTEFTLTISSLQPEDFATYFCQQFKSYPLTFGQG |
| | | TKLEIK |
| SEQ ID NO: 170 | VH | QVQLVQSGAEVKKPGSSVKVSCKASGTDFDKIY |
| | | IHWVRQAPGQGLEWMGRISAGSGNTKYNEKFK |
| | | GRVTITADTSTSTAYMELSSLRSEDTAVYYCAGS |
| | | YYSYDVLDYWGQGTTVTVSS |

A-H.33

| | | |
|---|---|---|
| SEQ ID NO: 171 | VH + VL | QVQLVQSGAEVKKPGSSVKVSCKASGTDFKLTY |
| | | IHWVRQAPGQGLEWMGRISAGSGNTKYNEKFK |
| | | GRVTITADTSTSTAYMELSSLRSEDTAVYYCAGS |
| | | YYSYDVLDYWGQGTTVTVSSGGGGSGGGGSGG |
| | | GGSGGGGSDIQMTQSPSFLSASVGDRVTITCKAS |
| | | QNVEDRVAWYQQKPGKAPKALIYSSSHRYKGV |
| | | PSRFSGSGSGTEFTLTISSLQPEDFATYFCQQFKS |
| | | YPLTFGQGTKLEIK |
| SEQ ID NO: 172 | VL | DIQMTQSPSFLSASVGDRVTITCKASQNVEDRVA |
| | | WYQQKPGKAPKALIYSSSHRYKGVPSRFSGSGS |
| | | GTEFTLTISSLQPEDFATYFCQQFKSYPLTFGQGT |
| | | KLEIK |
| SEQ ID NO: 173 | VH | QVQLVQSGAEVKKPGSSVKVSCKASGTDFKLTY |
| | | IHWVRQAPGQGLEWMGRISAGSGNTKYNEKFK |
| | | GRVTITADTSTSTAYMELSSLRSEDTAVYYCAGS |
| | | YYSYDVLDYWGQGTTVTVSS |

A-H.34

| | | |
|---|---|---|
| SEQ ID NO: 174 | VH + VL | QVQLVQSGAEVKKPGSSVKVSCKASGTDFRLTY |
| | | IHWVRQAPGQGLEWMGRISPGSGNTKYNEKFK |
| | | GRVTITADTSTSTAYMELSSLRSEDTAVYYCAGS |
| | | YYSYDVLDYWGQGTTVTVSSGGGGSGGGGSGG |
| | | GGSGGGGSDIQMTQSPSFLSASVGDRVTITCKAS |
| | | QNVGNRVAWYQQKPGKAPKALIYSSSHRYKGV |
| | | PSRFSGSGSGTEFTLTISSLQPEDFATYFCQQFKS |
| | | YPLTFGQGTKLEIK |
| SEQ ID NO: 175 | VL | DIQMTQSPSFLSASVGDRVTITCKASQNVGNRV |
| | | AWYQQKPGKAPKALIYSSSHRYKGVPSRFSGSG |
| | | SGTEFTLTISSLQPEDFATYFCQQFKSYPLTFGQG |
| | | TKLEIK |
| SEQ ID NO: 176 | VH | QVQLVQSGAEVKKPGSSVKVSCKASGTDFRLTY |
| | | IHWVRQAPGQGLEWMGRISPGSGNTKYNEKFK |
| | | GRVTITADTSTSTAYMELSSLRSEDTAVYYCAGS |
| | | YYSYDVLDYWGQGTTVTVSS |

A-H.35

| | | |
|---|---|---|
| SEQ ID NO: 177 | VH + VL | QVQLVQSGAEVKKPGSSVKVSCKASGHDFDKT |
| | | YIHWVRQAPGQGLEWMGRVSAGSGNVKYNEK |
| | | FKGRVTITADTSTSTAYMELSSLRSEDTAVYYCA |
| | | GSYYSYDVLDYWGQGTTVTVSSGGGGSGGGGS |
| | | GGGGSGGGGSDIQMTQSPSFLSASVGDRVTITCK |
| | | ASQNVEDRVAWYQQKPGKAPKALIYSSSHRYK |
| | | GVPSRFSGSGSGTEFTLTISSLQPEDFATYFCQQF |
| | | KSYPLTFGQGTKLEIK |
| SEQ ID NO: 178 | VL | DIQMTQSPSFLSASVGDRVTITCKASQNVEDRVA |
| | | WYQQKPGKAPKALIYSSSHRYKGVPSRFSGSGS |
| | | GTEFTLTISSLQPEDFATYFCQQFKSYPLTFGQGT |
| | | KLEIK |
| SEQ ID NO: 179 | VH | QVQLVQSGAEVKKPGSSVKVSCKASGHDFDKT |
| | | YIHWVRQAPGQGLEWMGRVSAGSGNVKYNEK |
| | | FKGRVTITADTSTSTAYMELSSLRSEDTAVYYCA |
| | | GSYYSYDVLDYWGQGTTVTVSS |

A-H.36

| | | |
|---|---|---|
| SEQ ID NO: 180 | VH + VL | QVQLVQSGAEVKKPGSSVKVSCKASGHDFKLT |
| | | YIHWVRQAPGQGLEWMGRVSPGSGNTKYNEKF |
| | | KGRVTITADTSTSTAYMELSSLRSEDTAVYYCA |
| | | GSYYSYDVLDYWGQGTTVTVSSGGGGSGGGGS |
| | | GGGGSGGGGSDIQMTQSPSFLSASVGDRVTITCK |
| | | ASQNVEDRVAWHQQKPGKAPKALIYSSSHRYK |
| | | GVPSRFSGSGSGTEFTLTISSLQPEDFATYFCQQF |
| | | KSYPLTFGQGTKLEIK |
| SEQ ID NO: 181 | VL | DIQMTQSPSFLSASVGDRVTITCKASQNVEDRVA |
| | | WHQQKPGKAPKALIYSSSHRYKGVPSRFSGSGS |
| | | GTEFTLTISSLQPEDFATYFCQQFKSYPLTFGQGT |
| | | KLEIK |
| SEQ ID NO: 182 | VH | QVQLVQSGAEVKKPGSSVKVSCKASGHDFKLT |
| | | YIHWVRQAPGQGLEWMGRVSPGSGNTKYNEKF |
| | | KGRVTITADTSTSTAYMELSSLRSEDTAVYYCA |
| | | GSYYSYDVLDYWGQGTTVTVSS |

A-H.37

| | | |
|---|---|---|
| SEQ ID NO: 183 | VH+VL | QVQLVQSGAEVKKPGSSVKVSCKASGHDFDKT |
| | | YIHWVRQAPGQGLEWMGRIYPGSGNVKYNEKF |
| | | KGRVTITADTSTSTAYMELSSLRSEDTAVYYCA |
| | | GSYYSYDVLDYWGQGTTVTVSSGGGGSGGGGS |
| | | GGGGSGGGGSDIQMTQSPSFLSASVGDRVTITCK |
| | | ASQNVADRVAWYQQKPGKAPKALIYSSSHRYK |
| | | GVPSRFSGSGSGTEFTLTISSLQPEDFATYFCQQF |
| | | KSYPLTFGQGTKLEIK |
| SEQ ID NO: 184 | VL | DIQMTQSPSFLSASVGDRVTITCKASQNVADRV |
| | | AWYQQKPGKAPKALIYSSSHRYKGVPSRFSGSG |
| | | SGTEFTLTISSLQPEDFATYFCQQFKSYPLTFGQG |
| | | TKLEIK |
| SEQ ID NO: 185 | VH | QVQLVQSGAEVKKPGSSVKVSCKASGHDFDKT |
| | | YIHWVRQAPGQGLEWMGRIYPGSGNVKYNEKF |
| | | KGRVTITADTSTSTAYMELSSLRSEDTAVYYCA |
| | | GSYYSYDVLDYWGQGTTVTVSS |

A-H.38

| | | |
|---|---|---|
| SEQ ID NO: 186 | VH + VL | QVQLVQSGAEVKKPGSSVKVSCKASGTDFDKT |
| | | YIHWVRQAPGQGLEWMGRISAGSGNVKYNEKF |
| | | KGRVTITADTSTSTAYMELSSLRSEDTAVYYCA |
| | | GSYYSYDVLDYWGQGTTVTVSSGGGGSGGGGS |
| | | GGGGSGGGGSDIQMTQSPSFLSASVGDRVTITCK |
| | | ASQNVDDRVAWYQQKPGKAPKALIYSSSHRYK |
| | | GVPSRFSGSGSGTEFTLTISSLQPEDFATYFCQQF |
| | | KSYPLTFGQGTKLEIK |
| SEQ ID NO: 187 | VL | DIQMTQSPSFLSASVGDRVTITCKASQNVDDRV |
| | | AWYQQKPGKAPKALIYSSSHRYKGVPSRFSGSG |
| | | SGTEFTLTISSLQPEDFATYFCQQFKSYPLTFGQG |
| | | TKLEIK |
| SEQ ID NO: 188 | VH | QVQLVQSGAEVKKPGSSVKVSCKASGTDFDKT |
| | | YIHWVRQAPGQGLEWMGRISAGSGNVKYNEKF |
| | | KGRVTITADTSTSTAYMELSSLRSEDTAVYYCA |
| | | GSYYSYDVLDYWGQGTTVTVSS |

A-H.39

| | | |
|---|---|---|
| SEQ ID NO: 189 | VH + VL | QVQLVQSGAEVKKPGSSVKVSCKASGTDFDKIY |
| | | IHWVRQAPGQGLEWMGRISAGSGNIKYNEKFK |
| | | GRVTITADTSTSTAYMELSSLRSEDTAVYYCAGS |
| | | YYSYDVLDYWGQGTTVTVSSGGGGSGGGGSGG |
| | | GGSGGGGSDIQMTQSPSFLSASVGDRVTITCKAS |
| | | QNVDDRVAWYQQKPGKAPKALIYSSSHRYKGV |
| | | PSRFSGSGSGTEFTLTISSLQPEDFATYFCQQFKS |
| | | YPLTFGQGTKLEIK |
| SEQ ID NO: 190 | VL | DIQMTQSPSFLSASVGDRVTITCKASQNVDDRV |
| | | AWYQQKPGKAPKALIYSSSHRYKGVPSRFSGSG |
| | | SGTEFTLTISSLQPEDFATYFCQQFKSYPLTFGQG |
| | | TKLEIK |
| SEQ ID NO: 191 | VH | QVQLVQSGAEVKKPGSSVKVSCKASGTDFDKIY |
| | | IHWVRQAPGQGLEWMGRISAGSGNIKYNEKFK |
| | | GRVTITADTSTSTAYMELSSLRSEDTAVYYCAGS |
| | | YYSYDVLDYWGQGTTVTVSS |

A-H.40

| | | |
|---|---|---|
| SEQ ID NO: 192 | VH + VL | QVQLVQSGAEVKKPGSSVKVSCKASGTDFDKIY |
| | | IHWVRQAPGQGLEWMGRISAGSGNVKYNEKFK |
| | | GRVTITADTSTSTAYMELSSLRSEDTAVYYCAGS |
| | | YYSYDVLDYWGQGTTVTVSSGGGGSGGGGSGG |
| | | GGSGGGGSDIQMTQSPSFLSASVGDRVTITCKAS |
| | | QNVGDRVAWYQQKPGKAPKALIYSSSHRYKGV |
| | | PSRFSGSGSGTEFTLTISSLQPEDFATYFCQQFKS |
| | | YPLTFGQGTKLEIK |
| SEQ ID NO: 193 | VL | DIQMTQSPSFLSASVGDRVTITCKASQNVGDRV |
| | | AWYQQKPGKAPKALIYSSSHRYKGVPSRFSGSG |
| | | SGTEFTLTISSLQPEDFATYFCQQFKSYPLTFGQG |
| | | TKLEIK |
| SEQ ID NO: 194 | VH | QVQLVQSGAEVKKPGSSVKVSCKASGTDFDKIY |
| | | IHWVRQAPGQGLEWMGRISAGSGNVKYNEKFK |
| | | GRVTITADTSTSTAYMELSSLRSEDTAVYYCAGS |
| | | YYSYDVLDYWGQGTTVTVSS |

A-H.41

| | | |
|---|---|---|
| SEQ ID NO: 195 | VH + VL | QVQLVQSGAEVKKPGSSVKVSCKASGGTFKLTY |
| | | IHWVRQAPGQGLEWMGRVSAGSGNVKYNEKF |
| | | KGRVTITADTSTSTAYMELSSLRSEDTAVYYCA |
| | | GSYYSYDVLDYWGQGTTVTVSSGGGGSGGGGS |
| | | GGGGSGGGGSDIQMTQSPSFLSASVGDRVTITCK |
| | | ASQNVDDRVAWYQQKPGKAPKALIYSSSHRYK |
| | | GVPSRFSGSGSGTEFTLTISSLQPEDFATYFCQQF |
| | | KSYPLTFGQGTKLEIK |
| SEQ ID NO: 196 | VL | DIQMTQSPSFLSASVGDRVTITCKASQNVDDRV |
| | | AWYQQKPGKAPKALIYSSSHRYKGVPSRFSGSG |
| | | SGTEFTLTISSLQPEDFATYFCQQFKSYPLTFGQG |
| | | TKLEIK |
| SEQ ID NO: 197 | VH | QVQLVQSGAEVKKPGSSVKVSCKASGGTFKLTY |
| | | IHWVRQAPGQGLEWMGRVSAGSGNVKYNEKF |
| | | KGRVTITADTSTSTAYMELSSLRSEDTAVYYCA |
| | | GSYYSYDVLDYWGQGTTVTVSS |

A-H.42

| | | |
|---|---|---|
| SEQ ID NO: 198 | VH + VL | QVQLVQSGAEVKKPGSSVKVSCKASGTDFKLTY |
| | | IHWVRQAPGQGLEWMGRISPGSGNVKYNEKFK |
| | | GRVTITADTSTSTAYMELSSLRSEDTAVYYCAGS |
| | | YYSYDVLDYWGQGTTVTVSSGGGGSGGGGSGG |
| | | GGSGGGGSDIQMTQSPSFLSASVGDRVTITCKAS |
| | | QNVDNRVAWHQQKPGKAPKALIYSSSHRYKGV |
| | | PSRFSGSGSGTEFTLTISSLQPEDFATYFCQQFKS |
| | | YPLTFGQGTKLEIK |
| SEQ ID NO: 199 | VL | DIQMTQSPSFLSASVGDRVTITCKASQNVDNRV |
| | | AWHQQKPGKAPKALIYSSSHRYKGVPSRFSGSG |
| | | SGTEFTLTISSLQPEDFATYFCQQFKSYPLTFGQG |
| | | TKLEIK |
| SEQ ID NO: 200 | VH | QVQLVQSGAEVKKPGSSVKVSCKASGTDFKLTY |
| | | IHWVRQAPGQGLEWMGRISPGSGNVKYNEKFK |
| | | GRVTITADTSTSTAYMELSSLRSEDTAVYYCAGS |
| | | YYSYDVLDYWGQGTTVTVSS |

A-H.43

| | | |
|---|---|---|
| SEQ ID NO: 201 | VH + VL | QVQLVQSGAEVKKPGSSVKVSCKASGHDFDKF |
| | | YIHWVRQAPGQGLEWMGRVSAGSGNTKYNEKF |
| | | KGRVTITADTSTSTAYMELSSLRSEDTAVYYCA |
| | | GSYYSYDVLDYWGQGTTVTVSSGGGGSGGGGS |
| | | GGGGSGGGGSDIQMTQSPSFLSASVGDRVTITCK |
| | | ASQNVDNRVAWYQQKPGKAPKALIYSSSHRYK |
| | | GVPSRFSGSGSGTEFTLTISSLQPEDFATYFCQQF |
| | | KSYPLTFGQGTKLEIK |
| SEQ ID NO: 202 | VL | DIQMTQSPSFLSASVGDRVTITCKASQNVDNRV |
| | | AWYQQKPGKAPKALIYSSSHRYKGVPSRFSGSG |
| | | SGTEFTLTISSLQPEDFATYFCQQFKSYPLTFGQG |
| | | TKLEIK |
| SEQ ID NO: 203 | VH | QVQLVQSGAEVKKPGSSVKVSCKASGHDFDKF |
| | | YIHWVRQAPGQGLEWMGRVSAGSGNTKYNEKF |
| | | KGRVTITADTSTSTAYMELSSLRSEDTAVYYCA |
| | | GSYYSYDVLDYWGQGTTVTVSS |

A-H.44

| | | |
|---|---|---|
| SEQ ID NO: 204 | VH + VL | QVQLVQSGAEVKKPGSSVKVSCKASGTDFDKFY |
| | | IHWVRQAPGQGLEWMGRVSAGSGNVKYNEKF |
| | | KGRVTITADTSTSTAYMELSSLRSEDTAVYYCA |
| | | GSYYSYDVLDYWGQGTTVTVSSGGGGSGGGGS |
| | | GGGGSGGGGSDIQMTQSPSFLSASVGDRVTITCK |
| | | ASQNVGDRVVWYQQKPGKAPKALIYSSSHRYK |
| | | GVPSRFSGSGSGTEFTLTISSLQPEDFATYFCQQF |
| | | KSYPLTFGQGTKLEIK |
| SEQ ID NO: 205 | VH | QVQLVQSGAEVKKPGSSVKVSCKASGTDFDKFY |
| | | IHWVRQAPGQGLEWMGRVSAGSGNVKYNEKF |
| | | KGRVTITADTSTSTAYMELSSLRSEDTAVYYCA |
| | | GSYYSYDVLDYWGQGTTVTVSS |

A-H.45

| | | |
|---|---|---|
| SEQ ID NO: 206 | VH + VL | QVQLVQSGAEVKKPGSSVKVSCKASGYSFTTYY |
| | | IHWVRQAPGQGLEWMGWFSAGSGNTKYNEKF |
| | | KGRVTITADISTSTAYMELSSLRSEDTAVYYCA |
| | | VSYYSYDVLDYWGQGTTVTVSSGGGGGGGGS |
| | | GGGGSGGGGSDIQMTQSPSFLSASVGDRVTITCK |
| | | ASQNVGINVVWHQQKPGKAPKALIYSSSHRYSG |
| | | VPSRFSGSGSGTEFTLTISSLQPEDFATYFCQQFK |
| | | SYPLTFGQGTKLEIK |
| SEQ ID NO: 207 | VH | QVQLVQSGAEVKKPGSSVKVSCKASGYSFTTYY |
| | | IHWVRQAPGQGLEWMGWFSAGSGNTKYNEKF |
| | | KGRVTITADTSTSTAYMELSSLRSEDTAVYYCA |
| | | VSYYSYDVLDYWGQGTTVTVSS |

A-H.46

| | | |
|---|---|---|
| SEQ ID NO: 208 | VH + VL | QVQLVQSGAEVKKPGSSVKVSCKASGYSFTTYY |
| | | IHWVRQAPGQGLEWMGWFSAGSGNTKYNEKF |
| | | KGRVTITADISTSTAYMELSSLRSEDTAVYYCA |
| | | GSYYSYDVLDYWGQGTTVTVSSGGGGSGGGGS |
| | | GGGGSGGGGSDIQMTQSPSFLSASVGDRVTITCK |
| | | ASQNVGINVVWHQQKPGKAPKALIYSSSHRYSG |
| | | VPSRFSGSGSGTEFTLTISSLQPEDFATYFCQQFK |
| | | SYPLTFGQGTKLEIK |
| SEQ ID NO: 209 | VH | QVQLVQSGAEVKKPGSSVKVSCKASGYSFTTYY |
| | | IHWVRQAPGQGLEWMGWFSAGSGNTKYNEKF |
| | | KGRVTITADTSTSTAYMELSSLRSEDTAVYYCA |
| | | GSYYSYDVLDYWGQGTTVTVSS |

A-H.47

| | | |
|---|---|---|
| SEQ ID NO: 210 | VH + VL | QVQLVQSGABVKKPGSSVKVSCKASGYSFTTYY |
| | | IHWVRQAPGQGLEWMGWFFPGSGNTKYNEKFK |
| | | GRVTITADTSTSTAYMELSSLRSEDTAVYYCAGS |
| | | YYSYDVLDYWGQGTTVTVSSGGGGSGGGGSGG |
| | | GGSGGGGSDIQMTQSPSFLSASVGDRVTITCKAS |
| | | QNVGINVVWHQQKPGKAPKALIYSSSHRYSGVP |
| | | SRFSGSGSGTEFTLTISSLQPEDFATYFCQQFKSY |
| | | PLTFGQGTKLEIK |
| SEQ ID NO: 211 | VH | QVQLVQSGAEVKKPGSSVKVSCKASGYSFTTYY |
| | | IHWVRQAPGQGLEWMGWFFPGSGNTKYNEKFK |
| | | GRVTITADTSTSTAYMELSSLRSEDTAVYYCAGS |
| | | YYSYDVLDYWGQGTTVTVSS |

A-H.48

| | | |
|---|---|---|
| SEQ ID NO: 212 | VH + VL | QVQLVQSGABVKKPGSSVKVSCKASGYSFTTYY |
| | | IHWVRQAPGQGLEWMGWFSPGSGNTKYNEKFK |
| | | GRVTITADTSTSTAYMELSSLRSEDTAVYYCAVS |
| | | YYSYDVLDYWGQGTTVTVSSGGGGSGGGGSGG |
| | | GGSGGGGSDIQMTQSPSFLSASVGDRVTITCKAS |
| | | QNVGINVVWHQQKPGKAPKALIYSSSHRYSGVP |
| | | SRFSGSGSGTEFTLTISSLQPEDFATYFCQQFKSY |
| | | PLTFGQGTKLEIK |
| SEQ ID NO: 213 | VH | QVQLVQSGAEVKKPGSSVKVSCKASGYSFTTYY |
| | | IHWVRQAPGQGLEWMGWFSPGSGNTKYNEKFK |
| | | GRVTITADTSTSTAYMELSSLRSEDTAVYYCAVS |
| | | YYSYDVLDYWGQGTTVTVSS |

A-H.49

| | | |
|---|---|---|
| SEQ ID NO: 214 | VH + VL | QVQLVQSGABVKKPGSSVKVSCKASGYSFTTYY |
| | | IHWVRQAPGQGLEWMGWFSPGSGNTKYNEKFK |
| | | GRVTITADTSTSTAYMELSSLRSEDTAVYYCAGS |
| | | YYSYDVLDYWGQGTTVTVSSGGGGSGGGGSGG |
| | | GGSGGGGSDIQMTQSPSFLSASVGDRVTITCKAS |
| | | QNVGINVVWHQQKPGKAPKALIYSSSHRYSGVP |
| | | SRFSGSGSGTEFTLTISSLQPEDFATYFCQQFKSY |
| | | PLTFGQGTKLEIK |
| SEQ ID NO: 215 | VH | QVQLVQSGAEVKKPGSSVKVSCKASGYSFTTYY |
| | | IHWVRQAPGQGLEWMGWFSPGSGNTKYNEKFK |
| | | GRVTITADTSTSTAYMELSSLRSEDTAVYYCAGS |
| | | YYSYDVLDYWGQGTTVTVSS |

A-H.50

| | | |
|---|---|---|
| SEQ ID NO: 216 | VH + VL | QVQLVQSGAEVKKPGSSVKVSCKASGYSFTTYY |
| | | IHWVRQAPGQGLEWMGRIFPGSGNIKYNEKFKG |
| | | RVTITADTSTSTAYMELSSLRSEDTAVYYCAGSY |
| | | YSYDVLDYWGQGTTVTVSSGGGGSGGGGSGGG |
| | | GSGGGGSDIQMTQSPSFLSASVGDRVTITCKASQ |
| | | NVGINVVWHQQKPGKAPKALTYSSSHRYSGVPS |
| | | RFSGSGSGTEFTLTISSLQPEDFATYFCQQFKSYP |
| | | LTFGQGTKLEIK |
| SEQ ID NO: 217 | VH | QVQLVQSGAEVKKPGSSVKVSCKASGYSFTTYY |
| | | IHWVRQAPGQGLEWMGRIFPGSGNIKYNEKFKG |
| | | RVTITADTSTSTAYMELSSLRSEDTAVYYCAGSY |
| | | YSYDVLDYWGQGTTVTVSS |

A-H.51

| | | |
|---|---|---|
| SEQ ID NO: 218 | VH + VL | QVQLVQSGABVKKPGSSVKVSCKASGYSFTTYY |
| | | IHWVRQAPGQGLEWMGWFFPGSGNIKYNEKFK |
| | | GRVTITADTSTSTAYMELSSLRSEDTAVYYCAGS |
| | | IYSAGVLDYWGQGTTVTVSSGGGGSGGGGSGG |
| | | GGSGGGGSDIQMTQSPSFLSASVGDRVTITCKAS |
| | | QNVGINVVWHQQKPGKAPKALIYSSSHRYSGVP |
| | | SRFSGSGSGTEFTLTISSLQPEDFATYFCQQFKSY |
| | | PLTFGQGTKLEIK |
| SEQ ID NO: 219 | VH | QVQLVQSGAEVKKPGSSVKVSCKASGYSFTTYY |
| | | IHWVRQAPGQGLEWMGWFFPGSGNIKYNEKFK |
| | | GRVTITADTSTSTAYMELSSLRSEDTAVYYCAGS |
| | | IYSAGVLDYWGQGTTVTVSS |

A-H.52

| | | |
|---|---|---|
| SEQ ID NO: 220 | VH + VL | QVQLVQSGAEVKKPGSSVKVSCKASGYSFTLGY |
| | | IHWVRQAPGQGLEWMGWFFPGSGNIKYNEKFK |
| | | GRVTITADTSTSTAYMELSSLRSEDTAVYYCAGS |
| | | YYSYDVLDYWGQGTTVTVSSGGGGSGGGGSGG |
| | | GGSGGGGSDIQMTQSPSFLSASVGDRVTITCKAS |
| | | QNVGINVVWHQQKPGKAPKALIYSSSHRYSGVP |
| | | SRFSGSGSGTEFTLTISSLQPEDFATYFCQQFKSY |
| | | PLTFGQGTKLEIK |
| SEQ ID NO: 221 | VH | QVQLVQSGAEVKKPGSSVKVSCKASGYSFTLGY |
| | | IHWVRQAPGQGLEWMGWFFPGSGNIKYNEKFK |
| | | GRVTITADTSTSTAYMELSSLRSEDTAVYYCAGS |
| | | YYSYDVLDYWGQGTTVTVSS |

A-H.53

| | | |
|---|---|---|
| SEQ ID NO: 222 | VH + VL | QVQLVQSGABVKKPGSSVKVSCKASGYSFRLTY |
| | | IHWVRQAPGQGLEWMGWFFPGSGNIKYNEKFK |
| | | GRVTITADTSTSTAYMELSSLRSEDTAVYYCAGS |
| | | YYSYDVLDYWGQGTTVTVSSGGGGSGGGGSGG |
| | | GGSGGGGSDIQMTQSPSFLSASVGDRVTITCKAS |
| | | QNVGINVVWHQQKPGKAPKALIYSSSHRYSGVP |
| | | SRFSGSGSGTEFTLTISSLQPEDFATYFCQQFKSY |
| | | PLTFGQGTKLEIK |
| SEQ ID NO: 223 | VH | QVQLVQSGAEVKKPGSSVKVSCKASGYSFRLTY |
| | | IHWVRQAPGQGLEWMGWFFPGSGNIKYNEKFK |
| | | GRVTITADTSTSTAYMELSSLRSEDTAVYYCAGS |
| | | YYSYDVLDYWGQGTTVTVSS |

A-H.54

| | | |
|---|---|---|
| SEQ ID NO: 224 | VH + VL | QVQLVQSGAEVKKPGSSVKVSCKASGYSFHNW |
| | | YIHWVRQAPGQGLEWMGWFFPGSGNIKYNEKF |
| | | KGRVTITADTSTSTAYMELSSLRSEDTAVYYCA |
| | | GSYYSYDVLDYWGQGTTVTVSSGGGGSGGGGS |
| | | GGGGSGGGGSDIQMTQSPSFLSASVGDRVTITCK |
| | | ASQNVGINVVWHQQKPGKAPKALIYSSSHRYSG |
| | | VPSRFSGSGSGTEFTLTISSLQPEDFATYFCQQFK |
| | | SYPLTFGQGTKLEIK |
| SEQ ID NO: 225 | VH | QVQLVQSGAEVKKPGSSVKVSCKASGYSFHNW |
| | | YIHWVRQAPGQGLEWMGWFFPGSGNIKYNEKF |
| | | KGRVTITADTSTSTAYMELSSLRSEDTAVYYCA |
| | | GSYYSYDVLDYWGQGTTVTVSS |

A-H.55 antibody

| | | |
|---|---|---|
| SEQ ID NO: 3 | HC CDR1 (Combined) | GYSFTTYYIH |
| SEQ ID NO: 4 | HC CDR2 (Combined) | WFFPGSGNIKYNEKFKG |
| SEQ ID NO: 5 | HC CDR3 (Combined) | SYYSYDVLDY |
| SEQ ID NO: 45 | HC CDR1 (Kabat) | TYYIH |
| SEQ ID NO: 46 | HC CDR2 (Kabat) | WFFPGSGNIKYNEKFKG |
| SEQ ID NO: 47 | HC CDR3 (Kabat) | SYYSYDVLDY |
| SEQ ID NO: 48 | HC CDR1 (Chothia) | GYSFTTY |
| SEQ ID NO: 49 | HC CDR2 (Chothia) | FPGSGN |
| SEQ ID NO: 50 | HC CDR3 (Chothia) | SYYSYDVLDY |
| SEQ ID NO: | VH | QVQLVQSGAEVKKPGSSVKVSCKASGYSFTTYY |
| 1100 | | IHWVRQAPGQGLEWMGWFFPGSGNIKYNEKFK |
| | | GRVTITADTSTSTAYMELSSLRSEDTAVYYCAGS |
| | | YYSYDVLDYWGQGTTVTVSS |
| SEQ ID NO: 6 | LC CDR1 (Combined) | KASQNVGINVV |
| SEQ ID NO: 7 | LC CDR2 (Combined) | SSSHRYS |
| SEQ ID NO: 8 | LC CDR3 (Combined) | QQFKSYPLT |
| SEQ ID NO: 51 | LC CDR1 (Kabat) | KASQNVGINVV |
| SEQ ID NO: 52 | LC CDR2 (Kabat) | SSSHRYS |
| SEQ ID NO: 53 | LC CDR3 (Kabat) | QQFKSYPLT |
| SEQ ID NO: 54 | LC CDR1 (Chothia) | KASQNVGINVV |
| SEQ ID NO: 55 | LC CDR2 (Chothia) | SSSHRYS |
| SEQ ID NO: 56 | LC CDR3 (Chothia) | QQFKSYPLT |
| SEQ ID NO: | VL | QSVLTQPPSVSEAPRQRVTISCKASQNVGINVVW |
| 1101 | | HQQLPGKAPKALIYSSSHRYSGVSDRFSGSGSGT |
| | | SFSLAISGLQSEDEADYFCQQFKSYPLTFGTGTK |
| | | VTVL |

A-H.56

| | | |
|---|---|---|
| SEQ ID NO: | VH + VL (ScFv) | QVQLVQSGAEVKKPGSSVKVSCKASGHDFDKF |
| 1309 | | YIHWVRQAPGQGLEWMGRVSAGSGNVKYNEK |
| | | FKGRVTITADTSTSTAYMELSSLRSEDTAVYYCA |
| | | GSYYSYDVLDYWGQGTTVTVSSGGGGSGGGGS |
| | | GGGGSGGGGSDIQMTQSPSFLSASVGDRVTITCK |
| | | ASQNVGNRVAWYQQKPGKAPKALIYSSSHRYK |
| | | GVPSRFSGSGSGTEFTLTISSLQPEDFATYFCQQF |
| | | KSYPLTFGQGTKLEIK |

A-H.57

| | | |
|---|---|---|
| SEQ ID NO: | VH + VL (ScFv) | QVQLVQSGAEVKKPGSSVKVSCKASGHDFRLTY |
| 1326 | | IHWVRQAPGQGLEWMGRVSAGSGNTKYNEKFK |
| | | GRVTITADTSTSTAYMELSSLRSEDTAVYYCAVS |
| | | YYSYDVLDYWGQGTTVTVSSGGGGSGGGGSGG |
| | | GGSGGGGSDIQMTQSPSFLSASVGDRVTITCKAS |
| | | QNVGDRVVWHQQKPGKAPKALIYSSSHRYKGV |
| | | PSRFSGSGSGTEFTLTISSLQPEDFATYFCQQFKS |
| | | YPLTFGQGTKLEIK |

A-H.58

| | | |
|---|---|---|
| SEQ ID NO: | VH + VL (ScFv) | QVQLVQSGAEVKKPGSSVKVSCKASGHDFRLTY |
| 1327 | | IHWVRQAPGQGLEWMGRVSAGSGNVKYNEKF |
| | | KGRVTITADTSTSTAYMELSSLRSEDTAVYYCA |
| | | VSYYSYDVLDYWGQGTTVTVSSGGGGSGGGGS |
| | | GGGGSGGGGSDIQMTQSPSFLSASVGDRVTITCK |
| | | ASQNVGNRVVWHQQKPGKAPKALIYSSSHRYK |
| | | GVPSRFSGSGSGTEFTLTISSLQPEDFATYFCQQF |
| | | KSYPLTFGQGTKLEIK |

A-H.59

| | | |
|---|---|---|
| SEQ ID NO: | VH + VL (ScFv) | QVQLVQSGAEVKKPGSSVKVSCKASGHDFRLTY |
| 1328 | | IHWVRQAPGQGLEWMGRIYAGSGNVKYNEKFK |
| | | GRVTITADTSTSTAYMELSSLRSEDTAVYYCAVS |
| | | YYSYDVLDYWGQGTTVTVSSGGGGSGGGGSGG |
| | | GGSGGGGSDIQMTQSPSFLSASVGDRVTITCKAS |
| | | QNVADRVVWHQQKPGKAPKALIYSSSHRYKGV |
| | | PSRFSGSGSGTEFTLTISSLQPEDFATYFCQQFKS |
| | | YPLTFGQGTKLEIK |

A-H.60

| | | |
|---|---|---|
| SEQ ID NO: | V H+ VL (ScFv) | QVQLVQSGAEVKKPGSSVKVSCKASGHDFKLT |
| 1329 | | YIHWVRQAPGQGLEWMGRVSAGSGNTKYNEKF |
| | | KGRVTITADTSTSTAYMELSSLRSEDTAVYYCA |
| | | VSYYSYDVLDYWGQGTTVTVSSGGGGSGGGGS |
| | | GGGGSGGGGSDIQMTQSPSFLSASVGDRVTITCK |
| | | ASQNVGDRVAWHQQKPGKAPKALIYSSSHRYK |
| | | GVPSRFSGSGSGTEFTLTISSLQPEDFATYFCQQF |
| | | KSYPLTFGQGTKLEIK |

A-H.61

| | | |
|---|---|---|
| SEQ ID NO: | VH + VL (ScFv) | QVQLVQSGAEVKKPGSSVKVSCKASGHDFKLT |
| 1330 | | YIHWVRQAPGQGLEWMGRVSAGSGNTKYNEKF |
| | | KGRVTITADTSTSTAYMELSSLRSEDTAVYYCA |
| | | VSYYSYDVLDYWGQGTTVTVSSGGGGSGGGGS |
| | | GGGGSGGGGSDIQMTQSPSFLSASVGDRVTITCK |
| | | ASQNVDNRVAWHQQKPGKAPKALIYSSSHRYK |
| | | GVPSRFSGSGSGTEFTLTISSLQPEDFATYFCQQF |
| | | KSYPLTFGQGTKLEIK |

A-H.62

| | | |
|---|---|---|
| SEQ ID NO: | VH + VL (ScFv) | QVQLVQSGAEVKKPGSSVKVSCKASGHDFRLTY |
| 1331 | | IHWVRQAPGQGLEWMGRVSAGSGNVKYNEKF |
| | | KGRVTITADTSTSTAYMELSSLRSEDTAVYYCA |
| | | VSYYSYDVLDYWGQGTTVTVSSGGGGSGGGGS |
| | | GGGGSGGGGSDIQMTQSPSFLSASVGDRVTITCK |
| | | ASQNVADRVVWHQQKPGKAPKALIYSSSHRYK |
| | | GVPSRFSGSGSGTEFTLTISSLQPEDFATYFCQQF |
| | | KSYPLTFGQGTKLEIK |

A-H.63

| | | |
|---|---|---|
| SEQ ID NO: | VH + VL (ScFv) | QVQLVQSGAEVKKPGSSVKVSCKASGHDFRLTY |
| 1332 | | IHWVRQAPGQGLEWMGRVYAGSGNTKYNEKF |
| | | KGRVTITADTSTSTAYMELSSLRSEDTAVYYCA |
| | | VSYYSYDVLDYWGQGTTVTVSSGGGGSGGGGS |
| | | GGGGSGGGGSDIQMTQSPSFLSASVGDRVTITCK |
| | | ASQNVEDRVVWHQQKPGKAPKALIYSSSHRYK |
| | | GVPSRFSGSGSGTEFTLTISSLQPEDFATYFCQQF |
| | | KSYPLTFGQGTKLEIK |

A-H.64

| | | |
|---|---|---|
| SEQ ID NO: | VH + VL (ScFv) | QVQLVQSGAEVKKPGSSVKVSCKASGHDFKLT |
| 1333 | | YIHWVRQAPGQGLEWMGRVSAGSGNTKYNEKF |
| | | KGRVTITADTSTSTAYMELSSLRSEDTAVYYCA |
| | | VSYYSYDVLDYWGQGTTVTVSSGGGGSGGGGS |
| | | GGGGSGGGGSDIQMTQSPSFLSASVGDRVTITCK |
| | | ASQNVADRVVWHQQKPGKAPKALIYSSSHRYK |
| | | GVPSRFSGSGSGTEFTLTISSLQPEDFATYFCQQF |
| | | KSYPLTFGQGTKLEIK |

A-H.65

| | | |
|---|---|---|
| SEQ ID NO: | V H+ VL (ScFv) | QVQLVQSGAEVKKPGSSVKVSCKASGHDFKLT |
| 1334 | | YIHWVRQAPGQGLEWMGRISAGSGNTKYNEKF |
| | | KGRVTITADTSTSTAYMELSSLRSEDTAVYYCA |
| | | VSYYSYDVLDYWGQGTTVTVSSGGGGSGGGGS |
| | | GGGGSGGGGSDIQMTQSPSFLSASVGDRVTITCK |
| | | ASQNVGDRVVWHQQKPGKAPKALIYSSSHRYK |
| | | GVPSRFSGSGSGTEFTLTISSLQPEDFATYFCQQF |
| | | KSYPLTFGQGTKLEIK |

A-H.66

| | | |
|---|---|---|
| SEQ ID NO: | VH + VL (ScFv) | QVQLVQSGAEVKKPGSSVKVSCKASGHDFKLT |
| 1335 | | YIHWVRQAPGQGLEWMGRIYAGSGNTKYNEKF |
| | | KGRVTITADTSTSTAYMELSSLRSEDTAVYYCA |
| | | VSYYSYDVLDYWGQGTTVTVSSGGGGSGGGGS |
| | | GGGGSGGGGSDIQMTQSPSFLSASVGDRVTITCK |
| | | ASQNVGDRVVWHQQKPGKAPKALIYSSSHRYK |
| | | GVPSRFSGSGSGTEFTLTISSLQPEDFATYFCQQF |
| | | KSYPLTFGQGTKLEIK |

A-H.67

| | | |
|---|---|---|
| SEQ ID NO: | VH + VL (ScFv) | QVQLVQSGAEVKKPGSSVKVSCKASGTDFKLTY |
| 1336 | | IHWVRQAPGQGLEWMGRIFPGSGNVKYNEKFK |
| | | GRVTITADTSTSTAYMELSSLRSEDTAVYYCAVS |
| | | YYSYDVLDYWGQGTTVTVSSGGGGSGGGGSGG |
| | | GGSGGGGSDIQMTQSPSFLSASVGDRVTITCKAS |
| | | QNVDNRVAWYQQKPGKAPKALIYSSSHRYKGV |
| | | PSRFSGSGSGTEFTLTISSLQPEDFATYFCQQFKS |
| | | YPLTFGQGTKLEIK |

A-H.68

| | | |
|---|---|---|
| SEQ ID NO: | VH + VL (ScFv) | QVQLVQSGAEVKKPGSSVKVSCKASGHDFRLTY |
| 1337 | | IHWVRQAPGQGLEWMGRISAGSGNVKYNEKFK |
| | | GRVTITADTSTSTAYMELSSLRSEDTAVYYCAVS |
| | | YYSYDVLDYWGQGTTVTVSSGGGGSGGGGSGG |
| | | GGSGGGGSDIQMTQSPSFLSASVGDRVTITCKAS |
| | | QNVADRVAWYQQKPGKAPKALIYSSSHRYKGV |
| | | PSRFSGSGSGTEFTLTISSLQPEDFATYFCQQFKS |
| | | YPLTFGQGTKLEIK |

A-H.69 (also referred to as A-H.13)

| | | |
|---|---|---|
| SEQ ID NO: 110 | VH+ VL (ScFv) | QVQLVQSGAEVKKPGSSVKVSCKASGTDFKLT |
| | | YIHWVRQAPGQGLEWMGRIFPGSGNVKYNEKF |
| | | KGRVTITADTSTSTAYMELSSLRSEDTAVYYCA |
| | | GSYYSYDVLDYWGQGTTVTVSSGGGGGGGG |
| | | SGGGGSGGGGSDIQMTQSPSFLSASVGDRVTI |
| | | TCKASQNVDNRVAWYQQKPGKAPKALIYSSSH |
| | | RYKGVPSRFSGSGSGTEFTLTISSLQPEDFATY |
| | | FCQQFKSYPLTFGQGTKLEIK |

A-H humanized-matured VH

| | | |
|---|---|---|
| SEQ ID NO: | VH-humanized | QVQLVQSGAEVKKPGSSVKVSCKASGTDFKLTY |
| 1310 | matured 1 | IHWVRQAPGQGLEWMGRIFPGSGNVKYNEKFK |
| | | GRVTITADTSTSTAYMELSSLRSEDTAVYYCAGS |
| | | YYSYDVLDYWGQGTTVTVSS |
| SEQ ID NO: | VH-humanized | QVQLVQSGAEVKKPGSSVKVSCKASGTDFKLTY |
| 1311 | matured 2 | IHWVRQAPGQGLEWMGRIFPGSGNVKYNEKFK |
| | | GRVTITADTSTSTAYMELSSLRSEDTAVYYCAVS |
| | | YYSYDVLDYWGQGTTVTVSS |
| SEQ ID NO: | VH-humanized | QVQLVQSGAEVKKPGSSVKVSCKASGHDFRLTY |
| 1312 | matured 3 | IHWVRQAPGQGLEWMGRISAGSGNVKYNEKFK |
| | | GRVTITADTSTSTAYMELSSLRSEDTAVYYCAVS |
| | | YYSYDVLDYWGQGTTVTVSS |

A-H humanized-matured VL

| | | |
|---|---|---|
| SEQ ID NO: | VL-humanized matured | DIQMTQSPSFLSASVGDRVTITCKASQNVDNRV |
| 1313 | 1 | AWYQQKPGKAPKALIYSSSHRYKGVPSRFSGSG |
| | | SGTEFTLTISSLQPEDFATYFCQQFKSYPLTFGQG |
| | | TKLEIK |
| SEQ ID NO: | VL-humanized matured | DIQMTQSPSFLSASVGDRVTITCKASQNVADRV |
| 1314 | 2 | AWYQQKPGKAPKALIYSSSHRYKGVPSRFSGSG |
| | | SGTEFTLTISSLQPEDFATYFCQQFKSYPLTFGQG |
| | | TKLEIK |

A-H.70

| | | |
|---|---|---|
| SEQ ID NO: | VH | QVQLVQSGAEVKKPGSSVKVSCKASGHDFRLTY |
| 1346 | (CDRs underlined) | IHWVRQAPGQGLEWMGRVSAGSGNVKYNEKF |
| | | KGRVTITADTSTSTAYMELSSLRSEDTAVYYCA |
| | | VSYYSYDVLDYWGQGTTVTVSS |
| SEQ ID NO: | VL | DIQMTQSPSFLSASVGDRVTITCKASQNVGNRV |
| 1347 | (CDRs underlined) | VWHQQKPGKAPKALIYSSSHRYKGVPSRFSGSG |
| | | SGTEFTLTISSLQPEDFATYFCQQFKSYPLTFGQG |
| | | TKLEIK |

A-H.71

| | | |
|---|---|---|
| SEQ ID NO: | VH | QVQLVQSGAEVKKPGSSVKVSCKASGHDFRLTY |
| 1348 | (CDRs underlined) | IHWVRQAPGQGLEWMGRIYAGSGNVKYNEKFK |
| | | GRVTITADTSTSTAYMELSSLRSEDTAVYYCAVS |
| | | YYSYDVLDYWGQGTTVTVSS |
| SEQ ID NO: | VL | DIQMTQSPSFLSASVGDRVTITCKASQNVADRV |
| 1349 | (CDRs underlined) | VWHQQKPGKAPKALIYSSSHRYKGVPSRFSGSG |
| | | SGTEFTLTISSLQPEDFATYFCQQFKSYPLTFGQG |
| | | TKLEIK |

A-H.72

| | | |
|---|---|---|
| SEQ ID NO: | VH | QVQLVQSGAEVKKPGSSVKVSCKASGHDFKLT |
| 1350 | (CDRs underlined) | YIHWVRQAPGQGLEWMGRVSAGSGNTKYNEKF |
| | | KGRVTITADTSTSTAYMELSSLRSEDTAVYYCA |
| | | VSYYSYDVLDYWGQGTTVTVSS |
| SEQ ID NO: | VL | DIQMTQSPSFLSASVGDRVTITCKASQNVGDRV |
| 1351 | (CDRs underlined) | AWHQQKPGKAPKALIYSSSHRYKGVPSRFSGSG |
| | | SGTEFTLTISSLQPEDFATYFCQQFKSYPLTFGQG |
| | | TKLEIK |

A-H.73

| | | |
|---|---|---|
| SEQ ID NO: | VH | QVQLVQSGAEVKKPGSSVKVSCKASGHDFKLT |
| 1350 | (CDRs underlined) | YIHWVRQAPGQGLEWMGRVSAGSGNTKYNEKF |
| | | KGRVTITADTSTSTAYMELSSLRSEDTAVYYCA |
| | | VSYYSYDVLDYWGQGTTVTVSS |
| SEQ ID NO: | VL | DIQMTQSPSFLSASVGDRVTITCKASQNVDNRV |
| 1353 | (CDRs underlined) | AWHQQKPGKAPKALIYSSSHRYKGVPSRFSGSG |
| | | SGTEFTLTISSLQPEDFATYFCQQFKSYPLTFGQG |
| | | TKLEIK |

A-H.74

| | | |
|---|---|---|
| SEQ ID NO: | VH | QVQLVQSGAEVKKPGSSVKVSCKASGHDFRLTY |
| 1346 | (CDRs underlined) | IHWVRQAPGQGLEWMGRVSAGSGNVKYNEKF |
| | | KGRVTITADTSTSTAYMELSSLRSEDTAVYYCA |
| | | VSYYSYDVLDYWGQGTTVTVSS |
| SEQ ID NO: | VL | DIQMTQSPSFLSASVGDRVTITCKASQNVADRV |
| 1349 | (CDRs underlined) | VWHQQKPGKAPKALIYSSSHRYKGVPSRFSGSG |
| | | SGTEFTLTISSLQPEDFATYFCQQFKSYPLTFGQG |
| | | TKLEIK |

A-H.75

| | | |
|---|---|---|
| SEQ ID NO: | VH | QVQLVQSGAEVKKPGSSVKVSCKASGHDFRLTY |
| 1356 | (CDRs underlined) | IHWVRQAPGQGLEWMGRVYAGSGNTKYNEKF |
| | | KGRVTITADTSTSTAYMELSSLRSEDTAVYYCA |
| | | VSYYSYDVLDYWGQGTTVTVSS |
| SEQ ID NO: | VL | DIQMTQSPSFLSASVGDRVTITCKASQNVEDRVV |
| 1357 | (CDRs underlined) | WHQQKPGKAPKALIYSSSHRYKGVPSRFSGSGS |
| | | GTEFTLTISSLQPEDFATYFCQQFKSYPLTFGQGT |
| | | KLEIK |

A-H.76

| | | |
|---|---|---|
| SEQ ID NO: | VH | QVQLVQSGAEVKKPGSSVKVSCKASGHDFKLT |
| 1350 | (CDRs underlined) | YIHWVRQAPGQGLEWMGRVSAGSGNTKYNEKF |
| | | KGRVTITADTSTSTAYMELSSLRSEDTAVYYCA |
| | | VSYYSYDVLDYWGQGTTVTVSS |
| SEQ ID NO: | VL | DIQMTQSPSFLSASVGDRVTITCKASQNVADRV |
| 1349 | (CDRs underlined) | VWHQQKPGKAPKALIYSSSHRYKGVPSRFSGSG |
| | | SGTEFTLTISSLQPEDFATYFCQQFKSYPLTFGQG |
| | | TKLEIK |

A-H.77

| | | |
|---|---|---|
| SEQ ID NO: | VH | QVQLVQSGAEVKKPGSSVKVSCKASGHDFKLT |
| 1360 | (CDRs underlined) | YIHWVRQAPGQGLEWMGRISAGSGNTKYNEKF |
| | | KGRVTITADTSTSTAYMELSSLRSEDTAVYYCA |
| | | VSYYSYDVLDYWGQGTTVTVSS |
| SEQ ID NO: | VL | DIQMTQSPSFLSASVGDRVTITCKASQNVGDRV |
| 1361 | (CDRs underlined) | VWHQQKPGKAPKALIYSSSHRYKGVPSRFSGSG |
| | | SGTEFTLTISSLQPEDFATYFCQQFKSYPLTFGQG |
| | | TKLEIK |

A-H.78

| | | |
|---|---|---|
| SEQ ID NO: | VH | QVQLVQSGAEVKKPGSSVKVSCKASGHDFKLT |
| 1362 | (CDRs underlined) | YIHWVRQAPGQGLEWMGRIYAGSGNTKYNEKF |
| | | KGRVTITADTSTSTAYMELSSLRSEDTAVYYCA |
| | | VSYYSYDVLDYWGQGTTVTVSS |
| SEQ ID NO: | VL | DIQMTQSPSFLSASVGDRVTITCKASQNVGDRV |
| 1361 | (CDRs underlined) | VWHQQKPGKAPKALIYSSSHRYKGVPSRFSGSG |
| | | SGTEFTLTISSLQPEDFATYFCQQFKSYPLTFGQG |
| | | TKLEIK |

A-H.79

| | | |
|---|---|---|
| SEQ ID NO: | VH | QVQLVQSGAEVKKPGSSVKVSCKASGHDFKLT |
| 1350 | (CDRs underlined) | YIHWVRQAPGQGLEWMGRVSAGSGNTKYNEKF |
| | | KGRVTITADTSTSTAYMELSSLRSEDTAVYYCA |
| | | VSYYSYDVLDYWGQGTTVTVSS |
| SEQ ID NO: | VL | DIQMTQSPSFLSASVGDRVTITCRASQNVDNRLG |
| 1365 | (CDRs underlined) | WHQQKPGKAPKALIYSSSHRYKGVPSRFSGSGS |
| | | GTEFTLTISSLQPEDFATYFCQQFKSYPLTFGQGT |
| | | KLEIK |

A-H.80

| | | |
|---|---|---|
| SEQ ID NO: | VH | QVQLVQSGAEVKKPGSSVKVSCKASGHDFKLT |
| 1350 | (CDRs underlined) | YIHWVRQAPGQGLEWMGRVSAGSGNTKYNEKF |
| | | KGRVTITADTSTSTAYMELSSLRSEDTAVYYCA |
| | | VSYYSYDVLDYWGQGTTVTVSS |
| SEQ ID NO: | VL | DIQMTQSPSFLSASVGDRVTITCKASQNVDNRV |
| 1367 | (CDRs underlined) | AWHQQKPGKAPKALIYAASSLQKGVPSRFSGSG |
| | | SGTEFTLTISSLQPEDFATYFCQQFKSYPLTFGQG |
| | | TKLEIK |

A-H.81

| | | |
|---|---|---|
| SEQ ID NO: | VH | QVQLVQSGAEVKKPGSSVKVSCKASGHDFKLT |
| 1350 | (CDRs underlined) | YIHWVRQAPGQGLEWMGRVSAGSGNTKYNEKF |
| | | KGRVTITADTSTSTAYMELSSLRSEDTAVYYCA |
| | | VSYYSYDVLDYWGQGTTVTVSS |
| SEQ ID NO: | VL | DIQMTQSPSFLSASVGDRVTITCKASQNVDNRV |
| 1369 | (CDRs underlined) | AWHQQKPGKAPKALIYSSSHRYKGVPSRFSGSG |
| | | SGTEFTLTISSLQPEDFATYFCLQHNSYPLTFGQG |
| | | TKLEIK |

A-H.82

| | | |
|---|---|---|
| SEQ ID NO: | VH | QVQLVQSGAEVKKPGSSVKVSCKASGHDFKLT |
| 1370 | (CDRs underlined) | YIHWVRQAPGQGLEWMGRVSAGSGNVNYAQK |
| | | FQGRVTITADTSTSTAYMELSSLRSEDTAVYYCA |
| | | VSYYSYDVLDYWGQGTTVTVSS |
| SEQ ID NO: | VL | DIQMTQSPSFLSASVGDRVTITCRASQNVDNRLG |
| 1365 | (CDRs underlined) | WHQQKPGKAPKALIYSSSHRYKGVPSRFSGSGS |
| | | GTEFTLTISSLQPEDFATYFCQQFKSYPLTFGQGT |
| | | KLEIK |

A-H.83

| | | |
|---|---|---|
| SEQ ID NO: | VH | QVQLVQSGAEVKKPGSSVKVSCKASGHDFKLT |
| 1370 | (CDRs underlined) | YIHWVRQAPGQGLEWMGRVSAGSGNVNYAQK |
| | | FQGRVTITADTSTSTAYMELSSLRSEDTAVYYCA |
| | | VSYYSYDVLDYWGQGTTVTVSS |
| SEQ ID NO: | VL | DIQMTQSPSFLSASVGDRVTITCKASQNVDNRV |
| 1367 | (CDRs underlined) | AWHQQKPGKAPKALIYAASSLQKGVPSRFSGSG |
| | | SGTEFTLTISSLQPEDFATYFCQQFKSYPLTFGQG |
| | | TKLEIK |

A-H.84

| | | |
|---|---|---|
| SEQ ID NO: | VH | QVQLVQSGAEVKKPGSSVKVSCKASGHDFKLT |
| 1370 | (CDRs underlined) | YIHWVRQAPGQGLEWMGRVSAGSGNVNYAQK |
| | | FQGRVTITADTSTSTAYMELSSLRSEDTAVYYCA |
| | | VSYYSYDVLDYWGQGTTVTVSS |
| SEQ ID NO: | VL | DIQMTQSPSFLSASVGDRVTITCKASQNVDNRV |
| 1369 | (CDRs underlined) | AWHQQKPGKAPKALIYSSSHRYKGVPSRFSGSG |
| | | SGTEFTLTISSLQPEDFATYFCLQHNSYPLTFGQG |
| | | TKLEIK |

A-H.85

| | | |
|---|---|---|
| SEQ ID NO: | VH | QVQLVQSGAEVKKPGSSVKVSCKASGHDFRLTY |
| 1344 | (CDRs underlined) | IHWVRQAPGQGLEWMGRVSAGSGNTKYNEKFK |
| | | GRVTITADTSTSTAYMELSSLRSEDTAVYYCAVS |
| | | YYSYDVLDYWGQGTTVTVSS |
| SEQ ID NO: | VL | DIQMTQSPSFLSASVGDRVTITCKASQNVGDRV |
| 1361 | (CDRs underlined) | VWHQQKPGKAPKALIYSSSHRYKGVPSRFSGSG |
| | | SGTEFTLTISSLQPEDFATYFCQQFKSYPLTFGQG |
| | | TKLEIK |

[0507] In some embodiments, the anti-TCRβ3V antibody molecule, e.g., anti-TCRβ3 V6 (e.g., anti-TCRβ V6-5*01) antibody molecule comprises a VH and/or a VL of an antibody described in TABLE 30, or a sequence with at least 80%, 85%, 90%, 95%, 96%, 97%, 98%, 99% or more identity thereto.

[0508] In some embodiments, the anti-TCRβV antibody molecule, e.g., anti-TCRβV6 (e.g., anti-TCRβ V6-5*01) antibody molecule comprises a VH and a VL of an antibody described in TABLE 30, or a sequence with at least 80%, 85%, 90%, 95%, 96%, 97%, 98%, 99% or more identity thereto.

[0509] In some embodiments, an anti-TCRVb antibody disclosed herein has an antigen binding domain having a VL having a consensus sequence of SEQ ID NO: 230, wherein position 30 is G, E, A or D; position 31 is N or D; position 32 is R or K; position 36 is Y or H; and/or position 56 is K or S.

[0510] In some embodiments, an anti-TCRVb antibody disclosed herein has an antigen binding domain having a VH having a consensus sequence of SEQ ID NO: 231, wherein: position 27 is H or T or G or Y; position 28 is D or T or S; position 30 is H or R or D or K or T; position 31 is L or D or K or T or N; position 32 is W or F or T or I or Y or G; position 49 is R or W; position 50 is V or I or F; position 51 is F or S or Y; position 52 is A or P; position 56 is N or S; position 57 is T or V or Y or I; position 58 is K or R; position 97 is G or V; position 99 is Y or I; position 102 is Y or A; and/or position 103 is D or G.

### Anti-TCRβ V12 Antibodies

[0511] Accordingly, in one aspect, the disclosure provides an anti-TCRβV antibody molecule that binds to human TCRβ V12, e.g., a TCRβ V12 subfamily comprising: TCRβ V12-4*01, TCRβ V12-3*01 or TCRβ V12-5*01. In some embodiments the TCRβ V12 subfamily comprises TCRβ V12-4*01. In some embodiments the TCRβ V12 subfamily comprises TCRβ V12-3*01.

[0512] In some embodiments, the anti-TCRβV antibody molecule, e.g., anti-TCRβ V12 antibody molecule, is a non-murine antibody molecule, e.g., a human or humanized antibody molecule. In some embodiments, the anti-TCRβV antibody molecule, e.g., anti-TCRβ V12 antibody molecule is a human antibody molecule. In some embodiments, the anti-TCRβV antibody molecule, e.g., anti-TCRβ V12 antibody molecule is a humanized antibody molecule.

[0513] In some embodiments, the anti-TCRβV antibody molecule, e.g., anti-TCRβ V12 antibody molecule, is isolated or recombinant.

[0514] In some embodiments, the anti-TCRβV antibody molecule, e.g., anti-TCRβ V12 antibody molecule, comprises at least one antigen-binding region, e.g., a variable region or an antigen-binding fragment thereof, from an antibody described herein, e.g., an antibody described in Table 31, or encoded by a nucleotide sequence in Table 31, or a sequence substantially identical (e.g., at least 80%, 85%, 90%, 92%, 95%, 97%, 98%, 99% or higher identical) to any of the aforesaid sequences.

[0515] In some embodiments, the anti-TCRβV antibody molecule, e.g., anti-TCRβ V12 antibody molecule, comprises at least one, two, three or four variable regions from an antibody described herein, e.g., an antibody as described in Table 31, or encoded by a nucleotide sequence in Table 31, or a sequence substantially identical (e.g., at least 80%, 85%, 90%, 92%, 95%, 97%, 98%, 99% or higher identical) to any of the aforesaid sequences.

[0516] In some embodiments, the anti-TCRβV antibody molecule, e.g., anti-TCRβ V12 antibody molecule, comprises at least one or two heavy chain variable regions from an antibody described herein, e.g., an antibody as described in Table 31, or encoded by a nucleotide sequence in Table 31, or a sequence substantially identical (e.g., at least 80%, 85%, 90%, 92%, 95%, 97%, 98%, 99% or higher identical) to any of the aforesaid sequences.

[0517] In some embodiments, the anti-TCRβV antibody molecule, e.g., anti-TCRβ V12 antibody molecule, comprises at least one or two light chain variable regions from an antibody described herein, e.g., an antibody as described in Table 31, or encoded by a nucleotide sequence in Table 31, or a sequence substantially identical (e.g., at least 80%, 85%, 90%, 92%, 95%, 97%, 98%, 99% or higher identical) to any of the aforesaid sequences.

[0518] In some embodiments, the anti-TCRβV antibody molecule, e.g., anti-TCRβ V12 antibody molecule, comprises a heavy chain constant region for an IgG4, e.g., a human IgG4. In still another embodiment, the anti-TCRβV antibody molecule, e.g., anti-TCRβ V12 antibody molecule, includes a heavy chain constant region for an IgG1, e.g., a human IgG1. In one embodiment, the heavy chain constant region comprises an amino sequence set forth in Table 32, or a sequence substantially identical (e.g., at least 80%, 85%, 90%, 92%, 95%, 97%, 98%, 99% or higher identical) thereto.

[0519] In some embodiments, the anti-TCRβV antibody molecule, e.g., anti-TCRβ V12 antibody molecule, includes a kappa light chain constant region, e.g., a human kappa light chain constant region. In one embodiment, the light chain constant region comprises an amino sequence set forth in Table 32, or a sequence substantially identical (e.g., at least 80%, 85%, 90%, 92%, 95%, 97%, 98%, 99% or higher identical) thereto.

[0520] In some embodiments, the anti-TCRβV antibody molecule, e.g., anti-TCRβ V12 antibody molecule, includes at least one, two, or three complementarity determining regions (CDRs) from a heavy chain variable region of an antibody described herein, e.g., an antibody as described in Table 31, or encoded by the nucleotide sequence in Table 31, or a sequence substantially identical (e.g., at least 80%, 85%, 90%, 92%, 95%, 97%, 98%, 99% or higher identical) to any of the aforesaid sequences.

[0521] In some embodiments, the anti-TCRβV antibody molecule, e.g., anti-TCRβ V12 antibody molecule, includes at least one, two, or three CDRs (or collectively all of the CDRs) from a heavy chain variable region comprising an amino acid sequence shown in Table 31, or encoded by a nucleotide sequence shown in Table 31. In one embodiment, one or more of the CDRs (or collectively all of the CDRs) have one, two, three, four, five, six or more changes, e.g., amino acid substitutions or deletions, relative to the amino acid sequence shown in Table 31, or encoded by a nucleotide sequence shown in Table 31.

[0522] In some embodiments, the anti-TCRβV antibody molecule, e.g., anti-TCRβ V12 antibody molecule, includes at least one, two, or three complementarity determining regions (CDRs) from a light chain variable region of an antibody described herein, e.g., an antibody as described in Table 31, or encoded by the nucleotide sequence in Table 31, or a sequence substantially identical (e.g., at least 80%, 85%, 90%, 92%, 95%, 97%, 98%, 99% or higher identical) to any of the aforesaid sequences.

[0523] In some embodiments, the anti-TCRβV antibody molecule, e.g., anti-TCRβ V12 antibody molecule, includes at least one, two, or three CDRs (or collectively all of the CDRs) from a light chain variable region comprising an amino acid sequence shown in Table 31, or encoded by a nucleotide sequence shown in Table 31. In one embodiment, one or more of the CDRs (or collectively all of the CDRs) have one, two, three, four, five, six or more changes, e.g., amino acid substitutions or deletions, relative to the amino acid sequence shown in Table 31, or encoded by a nucleotide sequence shown in Table 31.

[0524] In some embodiments, the anti-TCRβV antibody molecule, e.g., anti-TCRβ V12 antibody molecule, includes at least one, two, three, four, five or six CDRs (or collectively all of the CDRs) from a heavy and light chain variable region comprising an amino acid sequence shown in Table 31, or encoded by a nucleotide sequence shown in Table 31. In one embodiment, one or more of the CDRs (or collectively all of the CDRs) have one, two, three, four, five, six or more changes, e.g., amino acid substitutions or deletions, relative to the amino acid sequence shown in Table 31, or encoded by a nucleotide sequence shown in Table 31.

[0525] In some embodiments, the anti-TCRβV antibody molecule, e.g., anti-TCRβ V12 antibody molecule, molecule includes all six CDRs from an antibody described herein, e.g., an antibody as described in Table 31, or encoded by the nucleotide sequence in Table 31, or closely related CDRs, e.g., CDRs which are identical or which have at least one amino acid alteration, but not more than two, three or four alterations (e.g., substitutions, deletions, or insertions, e.g., conservative substitutions). In some embodiments, the anti-TCRβV antibody molecule, e.g., anti-TCRβ V12 antibody molecule, may include any CDR described herein.

[0526] In some embodiments, the anti-TCRβV antibody molecule, e.g., anti-TCRβ V12 antibody molecule includes at least one, two, or three CDRs according to Kabat et al. (e.g., at least one, two, or three CDRs according to the Kabat definition as set out in Table 31) from a heavy chain variable region of an antibody described herein, e.g., an antibody chosen as described in Table 31, or a sequence substantially identical (e.g., at least 80%, 85%, 90%, 92%, 95%, 97%, 98%, 99% or higher identical) to any of the aforesaid sequences; or which have at least one amino acid alteration, but not more than two, three or four alterations (e.g., substitutions, deletions, or insertions, e.g., conservative substitutions) relative to one, two, or three CDRs according to Kabat et al. shown in Table 31.

[0527] In some embodiments, the anti-TCRβV antibody molecule, e.g., anti-TCRβ V12 antibody molecule includes at least one, two, or three CDRs according to Kabat et al. (e.g., at least one, two, or three CDRs according to the Kabat definition as set out in Table 31) from a light chain variable region of an antibody described herein, e.g., an antibody as described in Table 31, or a sequence substantially identical (e.g., at least 80%, 85%, 90%, 92%, 95%, 97%, 98%, 99% or higher identical) to any of the aforesaid sequences; or which have at least one amino acid alteration, but not more than two, three or four alterations (e.g., substitutions, deletions, or insertions, e.g., conservative substitutions) relative to one, two, or three CDRs according to Kabat et al. shown in Table 31.

[0528] In some embodiments, the anti-TCRβV antibody molecule, e.g., anti-TCRβ V12 antibody molecule includes at least one, two, three, four, five, or six CDRs according to Kabat et al. (e.g., at least one, two, three, four, five, or six CDRs according to the Kabat definition as set out in Table 31) from the heavy and light chain variable regions of an antibody described herein, e.g., an antibody as described in Table 31, or encoded by the nucleotide sequence in Table 31; or a sequence substantially identical (e.g., at least 80%, 85%, 90%, 92%, 95%, 97%, 98%, 99% or higher identical) to any of the aforesaid sequences; or which have at least one amino acid alteration, but not more than two, three or four alterations (e.g., substitutions, deletions, or insertions, e.g., conservative substitutions) relative to one, two, three, four, five, or six CDRs according to Kabat et al. shown in Table 31.

[0529] In some embodiments, the anti-TCRβV antibody molecule, e.g., anti-TCRβ V12 antibody molecule includes all six CDRs according to Kabat et al. (e.g., all six CDRs according to the Kabat definition as set out in Table 31) from the heavy and light chain variable regions of an antibody described herein, e.g., an antibody as described in Table 31, or encoded by the nucleotide sequence in Table 31; or encoded by the nucleotide sequence in Table 31; or a sequence substantially identical (e.g., at least 80%, 85%, 90%, 92%, 95%, 97%, 98%, 99% or higher identical) to any of the aforesaid sequences; or which have at least one amino acid alteration, but not more than two, three or four alterations (e.g., substitutions, deletions, or insertions, e.g., conservative substitutions) relative to all six CDRs according to Kabat et al. shown in Table 31. In some embodiments, the anti-TCRβV antibody molecule, e.g., anti-TCRβ V12 antibody molecule may include any CDR described herein.

[0530] In some embodiments, the anti-TCRβV antibody molecule, e.g., anti-TCRβ V12 antibody molecule includes at least one, two, or three hypervariable loops that have the same canonical structures as the corresponding hypervariable loop of an antibody described herein, e.g., an antibody described in Table 31, e.g., the same canonical structures as at least loop 1 and/or loop 2 of the heavy and/or light chain variable domains of an antibody described herein. See, e.g., Chothia et al., (1992) J. Mol. Biol. 227:799-817; Tomlinson et al., (1992) J. Mol. Biol. 227:776-798 for descriptions of hypervariable loop canonical structures. These structures can be determined by inspection of the tables described in these references.

[0531] In some embodiments, the anti-TCRβV antibody molecule, e.g., anti-TCRβ V12 antibody molecule includes at least one, two, or three CDRs according to Chothia et al. (e.g., at least one, two, or three CDRs according to the Chothia definition as set out in Table 31) from a heavy chain variable region of an antibody described herein, e.g., an antibody chosen as described in Table 31, or a sequence substantially identical (e.g., at least 80%, 85%, 90%, 92%, 95%, 97%, 98%, 99% or higher identical) to any of the aforesaid sequences; or which have at least one amino acid alteration, but not more than two, three or four alterations (e.g., substitutions, deletions, or insertions, e.g., conservative substitutions) relative to one, two, or three CDRs according to Chothia et al. shown in Table 31.

[0532] In some embodiments, the anti-TCRβV antibody molecule, e.g., anti-TCRβ V12 antibody molecule includes at least one, two, or three CDRs according to Chothia et al. (e.g., at least one, two, or three CDRs according to the Chothia definition as set out in Table 31) from a light chain variable region of an antibody described herein, e.g., an antibody as described in Table 31, or a sequence substantially identical (e.g., at least 80%, 85%, 90%, 92%, 95%, 97%, 98%, 99% or higher identical) to any of the aforesaid sequences; or which have at least one amino acid alteration, but not more than two, three or four alterations (e.g., substitutions, deletions, or insertions, e.g., conservative substitutions) relative to one, two, or three CDRs according to Chothia et al. shown in Table 31.

[0533] In some embodiments, the anti-TCRβV antibody molecule, e.g., anti-TCRβ V12 antibody molecule includes at least one, two, three, four, five, or six CDRs according to Chothia et al. (e.g., at least one, two, three, four, five, or six CDRs according to the Chothia definition as set out in Table 31) from the heavy and light chain variable regions of an antibody described herein, e.g., an antibody as described in Table 31, or encoded by the nucleotide sequence in Table 31; or a sequence substantially identical (e.g., at least 80%, 85%, 90%, 92%, 95%, 97%, 98%, 99% or higher identical) to any of the aforesaid sequences; or which have at least one amino acid alteration, but not more than two, three or four alterations (e.g., substitutions, deletions, or insertions, e.g., conservative substitutions) relative to one, two, three, four, five, or six CDRs according to Chothia et al. shown in Table 31.

[0534] In some embodiments, the anti-TCRβV antibody molecule, e.g., anti-TCRβ V12 antibody molecule includes all six CDRs according to Chothia et al. (e.g., all six CDRs according to the Chothia definition as set out in Table 31) from the heavy and light chain variable regions of an antibody described herein, e.g., an antibody as described in Table 31, or encoded by the nucleotide sequence in Table 31; or encoded by the nucleotide sequence in Table 31; or a sequence substantially identical (e.g., at least 80%, 85%, 90%, 92%, 95%, 97%, 98%, 99% or higher identical) to any of the aforesaid sequences; or which have at least one amino acid alteration, but not more than two, three or four alterations (e.g., substitutions, deletions, or insertions, e.g., conservative substitutions) relative to all six CDRs according to Chothia et al. shown in Table 31. In some embodiments, the anti-TCRβV antibody molecule, e.g., anti-TCRβ V12 antibody molecule may include any CDR described herein.

[0535] In some embodiments, the anti-TCRβV antibody molecule, e.g., anti-TCRβ V12 antibody molecule includes at least one, two, or three CDRs according to a combined CDR (e.g., at least one, two, or three CDRs according to the combined CDR definition as set out in Table 31) from a heavy chain variable region of an antibody described herein, e.g., an antibody chosen as described in Table 31, or a sequence substantially identical (e.g., at least 80%, 85%, 90%, 92%, 95%, 97%, 98%, 99% or higher identical) to any of the aforesaid sequences; or which have at least one amino acid alteration, but not more than two, three or four alterations (e.g., substitutions, deletions, or insertions, e.g., conservative substitutions) relative to one, two, or three CDRs according to combined CDR shown in Table 31.

[0536] In some embodiments, the anti-TCRβV antibody molecule, e.g., anti-TCRβ V12 antibody molecule includes at least one, two, or three CDRs according to a combined CDR (e.g., at least one, two, or three CDRs according to the combined CDR definition as set out in Table 31) from a light chain variable region of an antibody described herein, e.g., an antibody as described in Table 31, or a sequence substantially identical (e.g., at least 80%, 85%, 90%, 92%, 95%, 97%, 98%, 99% or higher identical) to any of the aforesaid sequences; or which have at least one amino acid alteration, but not more than two, three or four alterations (e.g., substitutions, deletions, or insertions, e.g., conservative substitutions) relative to one, two, or three CDRs according to a combined CDR shown in Table 31.

[0537] In some embodiments, the anti-TCRβV antibody molecule, e.g., anti-TCRβ V12 antibody molecule includes at least one, two, three, four, five, or six CDRs according to a combined CDR. (e.g., at least one, two, three, four, five, or six CDRs according to the combined CDR definition as set out in Table 31) from the heavy and light chain variable regions of an antibody described herein, e.g., an antibody as described in Table 31, or encoded by the nucleotide sequence in Table 31; or a sequence substantially identical (e.g., at least 80%, 85%, 90%, 92%, 95%, 97%, 98%, 99% or higher identical) to any of the aforesaid sequences; or which have at least one amino acid alteration, but not more than two, three or four alterations (e.g., substitutions, deletions, or insertions, e.g., conservative substitutions) relative to one, two, three, four, five, or six CDRs according to a combined CDR shown in Table 31.

[0538] In some embodiments, the anti-TCRβV antibody molecule, e.g., anti-TCRβ V12 antibody molecule includes all six CDRs according to a combined CDR (e.g., all six CDRs according to the combined CDR definition as set out in Table 31) from the heavy and light chain variable regions of an antibody described herein, e.g., an antibody as described in Table 31, or encoded by the nucleotide sequence in Table 31; or encoded by the nucleotide sequence in Table 31; or a sequence substantially identical (e.g., at least 80%, 85%, 90%, 92%, 95%, 97%, 98%, 99% or higher identical) to any of the aforesaid sequences; or which have at least one amino acid alteration, but not more than two, three or four alterations (e.g., substitutions, deletions, or insertions, e.g., conservative substitutions) relative to all six CDRs according to a combined CDR shown in Table 31. In some embodiments, the anti-TCRβV antibody molecule, e.g., anti-TCRβ V12 antibody molecule may include any CDR described herein.

[0539] In some embodiments, a combined CDR as set out in TABLE 31 is a CDR that comprises a Kabat CDR and a Chothia CDR.

[0540] In some embodiments, the anti-TCRβV antibody molecule, e e.g., anti-TCRβ V12 antibody molecule, molecule includes a combination of CDRs or hypervariable loops identified as combined CDRs in TABLE 31. In some embodiments, the anti-TCRβV antibody molecule, e.g., anti-TCRβ V12 antibody molecule, can contain any combination of CDRs or hypervariable loops according the “combined” CDRs are described in TABLE 31.

[0541] In some embodiments, the anti-TCRβV antibody molecule, e.g., anti-TCRβ V12 antibody molecule includes a combination of CDRs or hypervariable loops defined according to the Kabat et al. and Chothia et al., or as described in TABLE 31

[0542] In some embodiments, the anti-TCRβV antibody molecule, e.g., anti-TCRβ V12 antibody molecule can contain any combination of CDRs or hypervariable loops according to the Kabat and Chothia definitions.

[0543] In an embodiment, e.g., an embodiment comprising a variable region, a CDR (e.g., a combined CDR, Chothia CDR or Kabat CDR), or other sequence referred to herein, e.g., in Table 31, the antibody molecule is a monospecific antibody molecule, a bispecific antibody molecule, a bivalent antibody molecule, a biparatopic antibody molecule, or an antibody molecule that comprises an antigen binding fragment of an antibody, e.g., a half antibody or antigen binding fragment of a half antibody. In some embodiments, the antibody molecule comprises a multispecific molecule, e.g., a bispecific molecule, e.g., as described herein.

[0544] In some embodiments, the anti-TCRβV antibody molecule, e.g., anti-TCRβ V12 antibody molecule includes:
[0545] (i) one, two or all of a light chain complementarity determining region 1 (LC CDR1), a light chain complementarity determining region 2 (LC CDR2), and a light chain complementarity determining region 3 (LC CDR3) of SEQ ID NO: 16, SEQ ID NO: 26, SEQ ID NO: 27, SEQ ID NO: 28, SEQ ID NO: 29 or SEQ ID NO: 30, and/or
[0546] (ii) one, two or all of a heavy chain complementarity determining region 1 (HC CDR1), heavy chain complementarity determining region 2 (HC CDR2), and a heavy chain complementarity determining region 3 (HC CDR3) of SEQ ID NO: 15, SEQ ID NO: 23, SEQ ID NO: 24 or SEQ ID NO: 25.

[0547] In some embodiments, the anti-TCRβV antibody molecule, e.g., anti-TCRβ V12 antibody molecule comprises:
[0548] (i) a LC CDR1 amino acid sequence of SEQ ID NO: 20, a LC CDR2 amino acid sequence of SEQ ID NO: 21, or a LC CDR3 amino acid sequence of SEQ ID NO: 22; and/or
[0549] (ii) a HC CDR1 amino acid sequence of SEQ ID NO: 17, a HC CDR2 amino acid sequence of SEQ ID NO: 18, or a HC CDR3 amino acid sequence of SEQ ID NO: 19.

[0550] In some embodiments, the anti-TCRβV antibody molecule, e.g., anti-TCRβ V12 antibody molecule comprises:
[0551] (i) a light chain variable region (VL) comprising a LC CDR1 amino acid sequence of SEQ ID NO: 20, a LC CDR2 amino acid sequence of SEQ ID NO: 21, and a LC CDR3 amino acid sequence of SEQ ID NO: 2; and/or
[0552] (ii) a heavy chain variable region (VH) comprising a HC CDR1 amino acid sequence of SEQ ID NO: 17, a HC CDR2 amino acid sequence of SEQ ID NO: 18, and a HC CDR3 amino acid sequence of SEQ ID NO: 19.

[0553] In some embodiments, the anti-TCRβV antibody molecule, e.g., anti-TCRβ V12 antibody molecule comprises:
[0554] (i) a LC CDR1 amino acid sequence of SEQ ID NO: 63, a LC CDR2 amino acid sequence of SEQ ID NO: 64, or a LC CDR3 amino acid sequence of SEQ ID NO: 65; and/or
[0555] (ii) a HC CDR1 amino acid sequence of SEQ ID NO: 57, a HC CDR2 amino acid sequence of SEQ ID NO: 58, or a HC CDR3 amino acid sequence of SEQ ID NO: 59.

[0556] In some embodiments, the anti-TCRβV antibody molecule, e.g., anti-TCRβ V12 antibody molecule comprises:
[0557] (i) a light chain variable region (VL) comprising a LC CDR1 amino acid sequence of SEQ ID NO: 63, a LC CDR2 amino acid sequence of SEQ ID NO: 64, or a LC CDR3 amino acid sequence of SEQ ID NO: 65; and/or
[0558] (ii) a heavy chain variable region (VH) comprising a HC CDR1 amino acid sequence of SEQ ID NO: 57, a HC CDR2 amino acid sequence of SEQ ID NO: 58, or a HC CDR3 amino acid sequence of SEQ ID NO: 59.

[0559] In some embodiments, the anti-TCRβV antibody molecule, e.g., anti-TCRβ V12 antibody molecule comprises:
[0560] (i) a LC CDR1 amino acid sequence of SEQ ID NO: 66, a LC CDR2 amino acid sequence of SEQ ID NO: 67, or a LC CDR3 amino acid sequence of SEQ ID NO: 68; and/or
[0561] (ii) a HC CDR1 amino acid sequence of SEQ ID NO: 60, a HC CDR2 amino acid sequence of SEQ ID NO: 61, or a HC CDR3 amino acid sequence of SEQ ID NO: 62.

[0562] In some embodiments, the anti-TCRβV antibody molecule, e.g., anti-TCRβ V12 antibody molecule comprises:
[0563] (i) a light chain variable region (VL) comprising a LC CDR1 amino acid sequence of SEQ ID NO: 63, a LC CDR2 amino acid sequence of SEQ ID NO: 64, or a LC CDR3 amino acid sequence of SEQ ID NO: 65; and/or
[0564] (ii) a heavy chain variable region (VH) comprising a HC CDR1 amino acid sequence of SEQ ID NO: 57, a HC CDR2 amino acid sequence of SEQ ID NO: 58, or a HC CDR3 amino acid sequence of SEQ ID NO: 59.

[0565] In one embodiment, the light or the heavy chain variable framework (e.g., the region encompassing at least FR1, FR2, FR3, and optionally FR4) of the anti-TCRβV antibody molecule, e.g., anti-TCRβ V12 antibody molecule can be chosen from: (a) a light or heavy chain variable framework including at least 80%, 85%, 87% 90%, 92%, 93%, 95%, 97%, 98%, or 100% of the amino acid residues from a human light or heavy chain variable framework, e.g., a light or heavy chain variable framework residue from a human mature antibody, a human germline sequence, or a human consensus sequence; (b) a light or heavy chain variable framework including from 20% to 80%, 40% to 60%, 60% to 90%, or 70% to 95% of the amino acid residues from a human light or heavy chain variable framework, e.g., a light or heavy chain variable framework residue from a human mature antibody, a human germline sequence, or a human consensus sequence; (c) a non-human framework (e.g., a rodent framework); or (d) a non-human framework that has been modified, e.g., to remove antigenic or cytotoxic determinants, e.g., deimmunized, or partially humanized. In one embodiment, the light or heavy chain variable framework region (particularly FR1, FR2 and/or FR3) includes a light or heavy chain variable framework sequence at least 70, 75, 80, 85, 87, 88, 90, 92, 94, 95, 96, 97, 98, 99% identical or identical to the frameworks of a VL or VH segment of a human germline gene.

[0566] In some embodiments, the anti-TCRβV antibody molecule, e.g., anti-TCRβ V12 antibody molecule, comprises a heavy chain variable domain having at least one, two, three, four, five, six, seven, ten, fifteen, twenty or more changes, e.g., amino acid substitutions or deletions, from an amino acid sequence described in Table 31.e.g., the amino acid sequence of the FR region in the entire variable region, e.g., shown in FIGS. 2A and 2B, or in SEQ ID NOs: 23-25.

[0567] Alternatively, or in combination with the heavy chain substitutions described herein the anti-TCRβV antibody molecule, e.g., anti-TCRβ V12 antibody molecule comprises a light chain variable domain having at least one, two, three, four, five, six, seven, ten, fifteen, twenty or more amino acid changes, e.g., amino acid substitutions or deletions, from an amino acid sequence of an antibody described herein e.g., the amino acid sequence of the FR region in the entire variable region, e.g., shown in FIGS. 2A and 2B, or in SEQ ID NOs: 26-30.

[0568] In some embodiments, the anti-TCRβV antibody molecule, e.g., anti-TCRβ V12 antibody molecule includes one, two, three, or four heavy chain framework regions shown in FIG. 2A, or a sequence substantially identical thereto.

[0569] In some embodiments, the anti-TCRβV antibody molecule, e.g., anti-TCRβ V12 antibody molecule includes one, two, three, or four light chain framework regions shown in FIG. 2B, or a sequence substantially identical thereto.

[0570] In some embodiments, the anti-TCRβV antibody molecule, e.g., anti-TCRβ V12 antibody molecule comprises the light chain framework region 1 e.g., as shown in FIG. 2B.

[0571] In some embodiments, the anti-TCRβV antibody molecule, e.g., anti-TCRβ V12 antibody molecule comprises the light chain framework region 2 e.g., as shown in FIG. 2B.

[0572] In some embodiments, the anti-TCRβV antibody molecule, e.g., anti-TCRβ V12 antibody molecule comprises the light chain framework region 3, e.g., as shown in FIG. 2B.

[0573] In some embodiments, the anti-TCRβV antibody molecule, e.g., anti-TCRβ V12 antibody molecule comprises the light chain framework region 4, e.g., as shown in FIG. 2B.

[0574] In some embodiments, the anti-TCRβV antibody molecule, e.g., anti-TCRβ V12 antibody molecule comprises a light chain comprising a framework region, e.g., framework region 1 (FR1), comprising a change, e.g., a substitution (e.g., a conservative substitution) at one or more, e.g., all, position disclosed herein according to Kabat numbering. In some embodiments, FR1 comprises an Aspartic Acid at position 1, e.g., a substitution at position 1 according to Kabat numbering, e.g., an Alanine to Aspartic Acid substitution. In some embodiments, FR1 comprises an Asparagine at position 2, e.g., a substitution at position 2 according to Kabat numbering, e.g., an Isoleucine to Asparagine substitution, Serine to Asparagine substitution or Tyrosine to Asparagine substitution. In some embodiments, FR1 comprises a Leucine at position 4, e.g., a substitution at position 4 according to Kabat numbering, e.g., a Methionine to Leucine substitution.

[0575] In some embodiments, the anti-TCRβV antibody molecule, e.g., anti-TCRβ V12 antibody molecule comprises a light chain comprising a framework region, e.g., framework region 1 (FR1), comprising a substitution at position 1 according to Kabat numbering, e.g., an Alanine to Aspartic Acid substitution, a substitution at position 2 according to Kabat numbering, e.g., an Isoleucine to Asparagine substitution, Serine to Asparagine substitution or Tyrosine to Asparagine substitution, and a substitution at position 4 according to Kabat numbering, e.g., a Methionine to Leucine substitution. In some embodiments, the anti-TCRβV antibody molecule, e.g., anti-TCRβ V12 antibody molecule comprises a light chain comprising a framework region, e.g., framework region 1 (FR1), comprising a substitution at position 1 according to Kabat numbering, e.g., an Alanine to Aspartic Acid substitution, and a substitution at position 2 according to Kabat numbering, e.g., an Isoleucine to Asparagine substitution, Serine to Asparagine substitution or Tyrosine to Asparagine substitution. In some embodiments, the anti-TCRβV antibody molecule, e.g., anti-TCRβ V12 antibody molecule comprises a light chain comprising a framework region, e.g., framework region 1 (FR1), comprising a substitution at position 1 according to Kabat numbering, e.g., an Alanine to Aspartic Acid substitution, and a substitution at position 4 according to Kabat numbering, e.g., a Methionine to Leucine substitution. In some embodiments, the anti-TCRβV antibody molecule, e.g., anti-TCRβ V12 antibody molecule comprises a light chain comprising a framework region, e.g., framework region 1 (FR1), comprising a substitution at position 2 according to Kabat numbering, e.g., an Isoleucine to Asparagine substitution, Serine to Asparagine substitution or Tyrosine to Asparagine substitution, and a substitution at position 4 according to Kabat numbering, e.g., a Methionine to Leucine substitution. In some embodiments, the substitution is relative to a human germline light chain framework region sequence.

[0576] In some embodiments, the anti-TCRβV antibody molecule, e.g., anti-TCRβ V12 antibody molecule comprises a light chain comprising a framework region, e.g., framework region 3 (FR3), comprising a change, e.g., a substitution (e.g., a conservative substitution) at one or more, e.g., all, position disclosed herein according to Kabat numbering. In some embodiments, FR3 comprises a Glycine at position 66, e.g., a substitution at position 66 according to Kabat numbering, e.g., a Lysine to Glycine substitution, or a Serine to Glycine substitution. In some embodiments, FR3 comprises an Asparagine at position 69, e.g., a substitution at position 69 according to Kabat numbering, e.g., a Tyrosine to Asparagine substitution. In some embodiments, FR3 comprises a Tyrosine at position 71, e.g., a substitution at position 71 according to Kabat numbering, e.g., a Phenylalanine to Tyrosine substitution, or an Alanine to Tyrosine substitution.

[0577] In some embodiments, the anti-TCRβV antibody molecule, e.g., anti-TCRβ V12 antibody molecule comprises a light chain comprising a framework region, e.g., framework region 3 (FR3), comprising a substitution at position 66 according to Kabat numbering, e.g., a Lysine to Glycine substitution, or a Serine to Glycine substitution, and a substitution at position 69 according to Kabat numbering, e.g., a Tyrosine to Asparagine substitution. In some embodiments, the anti-TCRβV antibody molecule, e.g., anti-TCRβ V12 antibody molecule comprises a light chain comprising a framework region, e.g., framework region 3 (FR3), comprising a substitution at position 66 according to Kabat numbering, e.g., Lysine to Glycine substitution, or a Serine to Glycine substitution, and a substitution at position 71 according to Kabat numbering, e.g., a Phenylalanine to Tyrosine substitution, or an Alanine to Tyrosine substitution. In some embodiments, the anti-TCRβV antibody molecule, e.g., anti-TCRβ V12 antibody molecule comprises a light chain comprising a framework region, e.g., framework region 3 (FR3), comprising a substitution at position 69 according to Kabat numbering, e.g., a Tyrosine to Asparagine substitution and a substitution at position 71 according to Kabat numbering, e.g., a Phenylalanine to Tyrosine substitution, or an Alanine to Tyrosine substitution. In some embodiments, the anti-TCRβV antibody molecule, e.g., anti-TCRβ V12 antibody molecule comprises a light chain comprising a framework region, e.g., framework region 3 (FR3), comprising a substitution at position 66 according to Kabat numbering, e.g., a Lysine to Glycine substitution, or a Serine to Glycine substitution, a substitution at position 69 according to Kabat numbering, e.g., a Tyrosine to Asparagine substitution and a substitution at position 71 according to Kabat numbering, e.g., a Phenylalanine to Tyrosine substitution, or an Alanine to Tyrosine substitution. In some embodiments, the substitution is relative to a human germline light chain framework region sequence.

[0578] In some embodiments, the anti-TCRβV antibody molecule, e.g., anti-TCRβ V12 antibody molecule comprises a light chain comprising: a framework region 1 (FR1) comprising a substitution at position 2 according to Kabat numbering, e.g., a Isoleucine to Asparagine substitution; and a framework region 3 (FR3), comprising a substitution at position 69 according to Kabat numbering, e.g., a Threonine to Asparagine substitution and a substitution at position 71 according to Kabat numbering, e.g., a Phenylalanine to Tyrosine substitution, e.g., as shown in the amino acid sequence of SEQ ID NO: 26. In some embodiments, the substitution is relative to a human germline light chain framework region sequence.

[0579] In some embodiments, the anti-TCRβV antibody molecule, e.g., anti-TCRβ V12 antibody molecule comprises a light chain comprising: (a) a framework region 1 (FR1) comprising a substitution at position 1 according to Kabat numbering, e.g., a Alanine to Aspartic Acid substitution, and a substitution at position 2 according to Kabat numbering, e.g., a Isoleucine to Asparagine substitution; and (b) a framework region 3 (FR3), comprising a substitution at position 69 according to Kabat numbering, e.g., a Threonine to Asparagine substitution and a substitution at position 71 according to Kabat numbering, e.g., a Phenylalanine to Tyrosine substitution, e.g., as shown in the amino acid sequence of SEQ ID NO: 27 In some embodiments, the substitution is relative to a human germline light chain framework region sequence.

[0580] In some embodiments, the anti-TCRβV antibody molecule, e.g., anti-TCRβ V12 antibody molecule comprises a light chain comprising: (a) a framework region 1 (FR1) comprising a substitution at position 2 according to Kabat numbering, e.g., a Serine to Asparagine substitution; and a substitution at position 4 according to Kabat numbering, e.g., a Methionine to Leucine substitution; and (b) a framework region 3 (FR3), comprising a substitution at position 69 according to Kabat numbering, e.g., a Threonine to Asparagine substitution and a substitution at position 71 according to Kabat numbering, e.g., a Phenylalanine to Tyrosine substitution, e.g., as shown in the amino acid sequence of SEQ ID NO: 28 In some embodiments, the substitution is relative to a human germline light chain framework region sequence.

[0581] In some embodiments, the anti-TCRβV antibody molecule, e.g., anti-TCRβ V12 antibody molecule comprises a light chain comprising: (a) a framework region 1 (FR1) comprising a substitution at position 2 according to Kabat numbering, e.g., a Serine to Asparagine substitution; and (b) a framework region 3 (FR3) comprising a substitution at position 66 according to Kabat numbering, e.g., a Lysine to Glycine substitution; a substitution at position 69 according to Kabat numbering, e.g., a Threonine to Asparagine substitution; and a substitution at position 71 according to Kabat numbering, e.g., a Alanine to Tyrosine substitution, e.g., as shown in the amino acid sequence of SEQ ID NO: 29. In some embodiments, the substitution is relative to a human germline light chain framework region sequence.

[0582] In some embodiments, the anti-TCRβV antibody molecule, e.g., anti-TCRβ V12 antibody molecule comprises a light chain comprising: (a) a framework region 1 (FR1) comprising a substitution at position 2 according to Kabat numbering, e.g., a Tyrosine to Asparagine substitution; and (b) a framework region 3 (FR3) comprising a substitution at position 66 according to Kabat numbering, e.g., a Serine to Glycine substitution; a substitution at position 69 according to Kabat numbering, e.g., a Threonine to Asparagine substitution; and a substitution at position 71 according to Kabat numbering, e.g., a Alanine to Tyrosine substitution, e.g., as shown in the amino acid sequence of SEQ ID NO: 29. In some embodiments, the substitution is relative to a human germline light chain framework region sequence.

[0583] In some embodiments, the anti-TCRβV antibody molecule, e.g., anti-TCRβ V12 antibody molecule comprises a light chain variable domain comprising: (a) a framework region 1 (FR1) comprising a change, e.g., a substitution (e.g., a conservative substitution) at one or more (e.g., all) positions disclosed herein according to Kabat numbering, and (b) a framework region 3 (FR3) comprising a change, e.g., a substitution (e.g., a conservative substitution) at one or more (e.g., all) position disclosed herein according to Kabat numbering. In some embodiments, the substitution is relative to a human germline light chain framework region sequence.

[0584] In some embodiments, the anti-TCRβV antibody molecule, e.g., anti-TCRβ V12 antibody molecule comprises the heavy chain framework region 1, e.g., as shown in FIG. 2A.

[0585] In some embodiments, the anti-TCRβV antibody molecule, e.g., anti-TCRβ V12 antibody molecule comprises the heavy chain framework region 2, e.g., as shown in FIG. 2A.

[0586] In some embodiments, the anti-TCRβV antibody molecule, e.g., anti-TCRβ V12 antibody molecule comprises the heavy chain framework region 3, e.g., as shown in FIG. 2A.

[0587] In some embodiments, the anti-TCRβV antibody molecule, e.g., anti-TCRβ V12 antibody molecule comprises the heavy chain framework region 4, e.g., as shown in FIG. 2A.

[0588] In some embodiments, the anti-TCRβV antibody molecule, e.g., anti-TCRβ V12 antibody molecule comprises the heavy chain framework regions 1-4, e.g., SEQ ID NOS: 20-23, or as shown in FIG. 2A.

[0589] In some embodiments, the anti-TCRβV antibody molecule, e.g., anti-TCRβ V12 antibody molecule comprises the light chain framework regions 1-4, e.g., SEQ ID NOs: 26-30, or as shown in FIG. 2B.

[0590] In some embodiments, the anti-TCRβV antibody molecule, e.g., anti-TCRβ V12 antibody molecule comprises the heavy chain framework regions 1-4, e.g., SEQ ID NOs: 23-25; and the light chain framework regions 1-4, e.g., SEQ ID NOs: 26-30, or as shown in FIGS. 2A and 2B.

[0591] In some embodiments, the heavy or light chain variable domain, or both, of, the anti-TCRβV antibody molecule, e.g., anti-TCRβ V12 antibody molecule includes an amino acid sequence, which is substantially identical to an amino acid disclosed herein, e.g., at least 80%, 85%, 90%, 92%, 95%, 97%, 98%, 99% or higher identical to a variable region of an antibody described herein, e.g., an antibody as described in Table 31, or encoded by the nucleotide sequence in Table 31; or which differs at least 1 or 5 residues, but less than 40, 30, 20, or 10 residues, from a variable region of an antibody described herein.

[0592] In some embodiments, the anti-TCRβV antibody molecule, e.g., anti-TCRβ V12 antibody molecule comprises at least one, two, three, or four antigen-binding regions, e.g., variable regions, having an amino acid sequence as set forth in Table 31, or a sequence substantially identical thereto (e.g., a sequence at least about 85%, 90%, 95%, 99% or more identical thereto, or which differs by no more than 1, 2, 5, 10, or 15 amino acid residues from the sequences shown in Table 31. In another embodiment, the anti-TCRβV antibody molecule, e.g., anti-TCRβ V12 antibody molecule includes a VH and/or VL domain encoded by a nucleic acid having a nucleotide sequence as set forth in Table 31, or a sequence substantially identical thereto (e.g., a sequence at least about 85%, 90%, 95%, 99% or more identical thereto, or which differs by no more than 3, 6, 15, 30, or 45 nucleotides from the sequences shown in Table 31.

[0593] In some embodiments, the anti-TCRβV antibody molecule, e.g., anti-TCRβ V12 antibody molecule comprises:
[0594] a VH domain comprising an amino acid sequence chosen from the amino acid sequence of SEQ ID NO: 23, SEQ ID NO:24 or SEQ ID NO:25, an amino acid sequence at least about 85%, 90%, 95%, 99% or more identical to the amino acid sequence SEQ ID NO: 23, SEQ ID NO:24 or SEQ ID NO:25, or an amino acid sequence which differs by no more than 1, 2, 5, 10, or 15 amino acid residues from the amino acid sequence of SEQ ID NO: 23, SEQ ID NO:24 or SEQ ID NO:25; and/or
[0595] a VL domain comprising an amino acid sequence chosen from the amino acid sequence of SEQ ID NO: 26, SEQ ID NO: 27, SEQ ID NO: 28, SEQ ID NO: 29 or SEQ ID NO: 30, an amino acid sequence at least about 85%, 90%, 95%, 99% or more identical to the amino acid sequence of SEQ ID NO: 26, SEQ ID NO: 27, SEQ ID NO: 28, SEQ ID NO: 29 or SEQ ID NO: 30, or an amino acid sequence which differs by no more than 1, 2, 5, 10, or 15 amino acid residues from the amino acid sequence of SEQ ID NO: 26, SEQ ID NO: 27, SEQ ID NO: 28, SEQ ID NO: 29 or SEQ ID NO: 30.

[0596] In some embodiments, the anti-TCRβV antibody molecule, e.g., anti-TCRβ V12 antibody molecule comprises:
[0597] a VH domain comprising the amino acid sequence of SEQ ID NO: 23, an amino acid sequence at least about 85%, 90%, 95%, 99% or more identical to the amino acid sequence SEQ ID NO: 23, or an amino acid sequence which differs by no more than 1, 2, 5, 10, or 15 amino acid residues from the amino acid sequence of SEQ ID NO: 23; and
[0598] a VL domain comprising the amino acid sequence of SEQ ID NO: 26, an amino acid sequence at least about 85%, 90%, 95%, 99% or more identical to the amino acid sequence SEQ ID NO: 26, or an amino acid sequence which differs by no more than 1, 2, 5, 10, or 15 amino acid residues from the amino acid sequence of SEQ ID NO: 26.

[0599] In some embodiments, the anti-TCRβV antibody molecule, e.g., anti-TCRβ V12 antibody molecule comprises:
[0600] a VH domain comprising the amino acid sequence of SEQ ID NO: 23, an amino acid sequence at least about 85%, 90%, 95%, 99% or more identical to the amino acid sequence SEQ ID NO: 23, or an amino acid sequence which differs by no more than 1, 2, 5, 10, or 15 amino acid residues from the amino acid sequence of SEQ ID NO: 23; and
[0601] a VL domain comprising the amino acid sequence of SEQ ID NO: 27, an amino acid sequence at least about 85%, 90%, 95%, 99% or more identical to the amino acid sequence SEQ ID NO: 27, or an amino acid sequence which differs by no more than 1, 2, 5, 10, or 15 amino acid residues from the amino acid sequence of SEQ ID NO: 27.

[0602] In some embodiments, the anti-TCRβV antibody molecule, e.g., anti-TCRβ V12 antibody molecule comprises:
[0603] a VH domain comprising the amino acid sequence of SEQ ID NO: 23, an amino acid sequence at least about 85%, 90%, 95%, 99% or more identical to the amino acid sequence SEQ ID NO: 23, or an amino acid sequence which differs by no more than 1, 2, 5, 10, or 15 amino acid residues from the amino acid sequence of SEQ ID NO: 23; and
[0604] a VL domain comprising the amino acid sequence of SEQ ID NO: 28, an amino acid sequence at least about 85%, 90%, 95%, 99% or more identical to the amino acid sequence SEQ ID NO: 28, or an amino acid sequence which differs by no more than 1, 2, 5, 10, or 15 amino acid residues from the amino acid sequence of SEQ ID NO: 28.

[0605] In some embodiments, the anti-TCRβV antibody molecule, e.g., anti-TCRβ V12 antibody molecule comprises:
[0606] a VH domain comprising the amino acid sequence of SEQ ID NO: 23, an amino acid sequence at least about 85%, 90%, 95%, 99% or more identical to the amino acid sequence SEQ ID NO: 23, or an amino acid sequence which differs by no more than 1, 2, 5, 10, or 15 amino acid residues from the amino acid sequence of SEQ ID NO: 23; and
[0607] a VL domain comprising the amino acid sequence of SEQ ID NO: 29, an amino acid sequence at least about 85%, 90%, 95%, 99% or more identical to the amino acid sequence SEQ ID NO: 29, or an amino acid sequence which differs by no more than 1, 2, 5, 10, or 15 amino acid residues from the amino acid sequence of SEQ ID NO: 29.

[0608] In some embodiments, the anti-TCRβV antibody molecule, e.g., anti-TCRβ V12 antibody molecule comprises:
[0609] a VH domain comprising the amino acid sequence of SEQ ID NO: 23, an amino acid sequence at least about 85%, 90%, 95%, 99% or more identical to the amino acid sequence SEQ ID NO: 23, or an amino acid sequence which differs by no more than 1, 2, 5, 10, or 15 amino acid residues from the amino acid sequence of SEQ ID NO: 23; and
[0610] a VL domain comprising the amino acid sequence of SEQ ID NO: 30, an amino acid sequence at least about 85%, 90%, 95%, 99% or more identical to the amino acid sequence SEQ ID NO: 30, or an amino acid sequence which differs by no more than 1, 2, 5, 10, or 15 amino acid residues from the amino acid sequence of SEQ ID NO: 30.

[0611] In some embodiments, the anti-TCRβV antibody molecule, e.g., anti-TCRβ V12 antibody molecule comprises:
[0612] a VH domain comprising the amino acid sequence of SEQ ID NO: 24, an amino acid sequence at least about 85%, 90%, 95%, 99% or more identical to the amino acid sequence SEQ ID NO: 24, or an amino acid sequence which differs by no more than 1, 2, 5, 10, or 15 amino acid residues from the amino acid sequence of SEQ ID NO: 24; and
[0613] a VL domain comprising the amino acid sequence of SEQ ID NO: 26, an amino acid sequence at least about 85%, 90%, 95%, 99% or more identical to the amino acid sequence SEQ ID NO: 26, or an amino acid sequence which differs by no more than 1, 2, 5, 10, or 15 amino acid residues from the amino acid sequence of SEQ ID NO: 26.

[0614] In some embodiments, the anti-TCRβV antibody molecule, e.g., anti-TCRβ V12 antibody molecule comprises:
[0615] a VH domain comprising the amino acid sequence of SEQ ID NO: 24, an amino acid sequence at least about 85%, 90%, 95%, 99% or more identical to the amino acid sequence SEQ ID NO: 24, or an amino acid sequence which differs by no more than 1, 2, 5, 10, or 15 amino acid residues from the amino acid sequence of SEQ ID NO: 24; and
[0616] a VL domain comprising the amino acid sequence of SEQ ID NO: 27, an amino acid sequence at least about 85%, 90%, 95%, 99% or more identical to the amino acid sequence SEQ ID NO: 27, or an amino acid sequence which differs by no more than 1, 2, 5, 10, or 15 amino acid residues from the amino acid sequence of SEQ ID NO: 27.

[0617] In some embodiments, the anti-TCRβV antibody molecule, e.g., anti-TCRβ V12 antibody molecule comprises:
[0618] a VH domain comprising the amino acid sequence of SEQ ID NO: 24, an amino acid sequence at least about 85%, 90%, 95%, 99% or more identical to the amino acid sequence SEQ ID NO: 24, or an amino acid sequence which differs by no more than 1, 2, 5, 10, or 15 amino acid residues from the amino acid sequence of SEQ ID NO: 24; and
[0619] a VL domain comprising the amino acid sequence of SEQ ID NO: 28, an amino acid sequence at least about 85%, 90%, 95%, 99% or more identical to the amino acid sequence SEQ ID NO: 28, or an amino acid sequence which differs by no more than 1, 2, 5, 10, or 15 amino acid residues from the amino acid sequence of SEQ ID NO: 28.

[0620] In some embodiments, the anti-TCRβV antibody molecule, e.g., anti-TCRβ V12 antibody molecule comprises:
[0621] a VH domain comprising the amino acid sequence of SEQ ID NO: 24, an amino acid sequence at least about 85%, 90%, 95%, 99% or more identical to the amino acid sequence SEQ ID NO: 24, or an amino acid sequence which differs by no more than 1, 2, 5, 10, or 15 amino acid residues from the amino acid sequence of SEQ ID NO: 24; and
[0622] a VL domain comprising the amino acid sequence of SEQ ID NO: 29, an amino acid sequence at least about 85%, 90%, 95%, 99% or more identical to the amino acid sequence SEQ ID NO: 29, or an amino acid sequence which differs by no more than 1, 2, 5, 10, or 15 amino acid residues from the amino acid sequence of SEQ ID NO: 29.

[0623] In some embodiments, the anti-TCRβV antibody molecule, e.g., anti-TCRβ V12 antibody molecule comprises:
[0624] a VH domain comprising the amino acid sequence of SEQ ID NO: 24, an amino acid sequence at least about 85%, 90%, 95%, 99% or more identical to the amino acid sequence SEQ ID NO: 24, or an amino acid sequence which differs by no more than 1, 2, 5, 10, or 15 amino acid residues from the amino acid sequence of SEQ ID NO: 24; and
[0625] a VL domain comprising the amino acid sequence of SEQ ID NO: 30, an amino acid sequence at least about 85%, 90%, 95%, 99% or more identical to the amino acid sequence SEQ ID NO: 30, or an amino acid sequence which differs by no more than 1, 2, 5, 10, or 15 amino acid residues from the amino acid sequence of SEQ ID NO: 30.

[0626] In some embodiments, the anti-TCRβV antibody molecule, e.g., anti-TCRβ V12 antibody molecule comprises:
[0627] a VH domain comprising the amino acid sequence of SEQ ID NO: 25, an amino acid sequence at least about 85%, 90%, 95%, 99% or more identical to the amino acid sequence SEQ ID NO: 25, or an amino acid sequence which differs by no more than 1, 2, 5, 10, or 15 amino acid residues from the amino acid sequence of SEQ ID NO: 25; and
[0628] a VL domain comprising the amino acid sequence of SEQ ID NO: 26, an amino acid sequence at least about 85%, 90%, 95%, 99% or more identical to the amino acid sequence SEQ ID NO: 26, or an amino acid sequence which differs by no more than 1, 2, 5, 10, or 15 amino acid residues from the amino acid sequence of SEQ ID NO: 26.

[0629] In some embodiments, the anti-TCRβV antibody molecule, e.g., anti-TCRβ V12 antibody molecule comprises:
[0630] a VH domain comprising the amino acid sequence of SEQ ID NO: 25, an amino acid sequence at least about 85%, 90%, 95%, 99% or more identical to the amino acid sequence SEQ ID NO: 25, or an amino acid sequence which differs by no more than 1, 2, 5, 10, or 15 amino acid residues from the amino acid sequence of SEQ ID NO: 25; and
[0631] a VL domain comprising the amino acid sequence of SEQ ID NO: 27, an amino acid sequence at least about 85%, 90%, 95%, 99% or more identical to the amino acid sequence SEQ ID NO: 27, or an amino acid sequence which differs by no more than 1, 2, 5, 10, or 15 amino acid residues from the amino acid sequence of SEQ ID NO: 27.

[0632] In some embodiments, the anti-TCRβV antibody molecule, e.g., anti-TCRβ V12 antibody molecule comprises:
[0633] a VH domain comprising the amino acid sequence of SEQ ID NO: 25, an amino acid sequence at least about 85%, 90%, 95%, 99% or more identical to the amino acid sequence SEQ ID NO: 25, or an amino acid sequence which differs by no more than 1, 2, 5, 10, or 15 amino acid residues from the amino acid sequence of SEQ ID NO: 25; and
[0634] a VL domain comprising the amino acid sequence of SEQ ID NO: 28, an amino acid sequence at least about 85%, 90%, 95%, 99% or more identical to the amino acid sequence SEQ ID NO: 28, or an amino acid sequence which differs by no more than 1, 2, 5, 10, or 15 amino acid residues from the amino acid sequence of SEQ ID NO: 28.

[0635] In some embodiments, the anti-TCRβV antibody molecule, e.g., anti-TCRβ V12 antibody molecule comprises:
[0636] a VH domain comprising the amino acid sequence of SEQ ID NO: 25, an amino acid sequence at least about 85%, 90%, 95%, 99% or more identical to the amino acid sequence SEQ ID NO: 25, or an amino acid sequence which differs by no more than 1, 2, 5, 10, or 15 amino acid residues from the amino acid sequence of SEQ ID NO: 25; and
[0637] a VL domain comprising the amino acid sequence of SEQ ID NO: 29, an amino acid sequence at least about 85%, 90%, 95%, 99% or more identical to the amino acid sequence SEQ ID NO: 29, or an amino acid sequence which differs by no more than 1, 2, 5, 10, or 15 amino acid residues from the amino acid sequence of SEQ ID NO: 29.

[0638] In some embodiments, the anti-TCRβV antibody molecule, e.g., anti-TCRβ V12 antibody molecule comprises:
[0639] a VH domain comprising the amino acid sequence of SEQ ID NO: 25, an amino acid sequence at least about 85%, 90%, 95%, 99% or more identical to the amino acid sequence SEQ ID NO: 25, or an amino acid sequence which differs by no more than 1, 2, 5, 10, or 15 amino acid residues from the amino acid sequence of SEQ ID NO: 25; and
[0640] a VL domain comprising the amino acid sequence of SEQ ID NO: 30, an amino acid sequence at least about 85%, 90%, 95%, 99% or more identical to the amino acid sequence SEQ ID NO: 30, or an amino acid sequence which differs by no more than 1, 2, 5, 10, or 15 amino acid residues from the amino acid sequence of SEQ ID NO: 30.

[0641] In some embodiments, the anti-TCRβV antibody molecule, e.g., anti-TCRβ V12 antibody molecule is a full antibody or fragment thereof (e.g., a Fab, F(ab′)₂, Fv, or a single chain Fv fragment (scFv)). In some embodiments, the anti-TCRβV antibody molecule, e.g., anti-TCRβ V6 (e.g., anti-TCRβ V6-5*01) antibody molecule is a monoclonal antibody or an antibody with single specificity. In some embodiments, the anti-TCRβV antibody molecule, e.g., anti-TCRβ V12 antibody molecule, can also be a humanized, chimeric, camelid, shark, or an in vitro-generated antibody molecule. In some embodiments, the anti-TCRβV antibody molecule, e.g., anti-TCRβ V12 antibody molecule is a humanized antibody molecule. The heavy and light chains of the anti-TCRβV antibody molecule, e.g., anti-TCRβ V12 antibody molecule can be full-length (e.g., an antibody can include at least one, and preferably two, complete heavy chains, and at least one, and preferably two, complete light chains) or can include an antigen-binding fragment (e.g., a Fab, F(ab′)₂, Fv, a single chain Fv fragment, a single domain antibody, a diabody (dAb), a bivalent antibody, or bispecific antibody or fragment thereof, a single domain variant thereof, or a camelid antibody).

[0642] In some embodiments, the anti-TCRβV antibody molecule, e.g., anti-TCRβ V12 antibody molecule is in the form of a multispecific molecule, e.g., a bispecific molecule, e.g., as described herein.

[0643] In some embodiments, the anti-TCRβV antibody molecule, e.g., anti-TCRβ V12 antibody molecule has a heavy chain constant region (Fc) chosen from, e.g., the heavy chain constant regions of IgG1, IgG2, IgG3, IgG4, IgM, IgA1, IgA2, IgD, and IgE. In some embodiments, the Fc region is chosen from the heavy chain constant regions of IgG1, IgG2, IgG3, and IgG4. In some embodiments, the Fc region is chosen from the heavy chain constant region of IgG1 or IgG2 (e.g., human IgG1, or IgG2). In some embodiments, the heavy chain constant region is human IgG1.

[0644] In some embodiments, the anti-TCRβV antibody molecule, e.g., anti-TCRβ V12 antibody molecule has a light chain constant region chosen from, e.g., the light chain constant regions of kappa or lambda, preferably kappa (e.g., human kappa). In one embodiment, the constant region is altered, e.g., mutated, to modify the properties of the anti-TCRβV antibody molecule, e.g., anti-TCRβ V12 antibody molecule (e.g., to increase or decrease one or more of: Fc receptor binding, antibody glycosylation, the number of cysteine residues, effector cell function, or complement function). For example, the constant region is mutated at positions 296 (M to Y), 298 (S to T), 300 (T to E), 477 (H to K) and 478 (N to F) to alter Fc receptor binding (e.g., the mutated positions correspond to positions 132 (M to Y), 134 (S to T), 136 (T to E), 313 (H to K) and 314 (N to F) of SEQ ID NOs: 212 or 214; or positions 135 (M to Y), 137 (S to T), 139 (T to E), 316 (H to K) and 317 (N to F) of SEQ ID NOs: 215, 216, 217 or 218).

[0645] Antibody B-H.1 comprises a first chain comprising the amino acid sequence of SEQ ID NO: 3280 and a second chain comprising the amino acid sequence of SEQ ID NO: 3281.

[0646] Additional exemplary anti-TCRβ V12 antibodies of the disclosure are provided in Table 31. In some embodiments, the anti-TCRβ V12 is antibody B, e.g., humanized antibody B (antibody B-H), as provided in Table 31. In some embodiments, the anti-TCRβV antibody comprises one or more (e.g., all three) of a LC CDR1, LC CDR2, and LC CDR3 provided in Table 31; and/or one or more (e.g., all three) of a HC CDR1, HC CDR2, and HC CDR3 provided in Table 31, or a sequence with at least 95% identity thereto. In some embodiments, antibody B comprises a variable heavy chain (VH) and/or a variable light chain (VL) provided in Table 31, or a sequence with at least 95% identity thereto.

TABLE 31
Amino acid and nucleotide sequences for murine and humanized antibody molecules which
bind to TCRVB 12, e.g., TCRVB 12-3 or TCRVB 12-4. The antibody molecules include murine mAb
Antibody B and humanized mAb Antibody B-H.1 to B-H.6. The amino acid the heavy and light chain
CDRs, and the amino acid and nucleotide sequences of the heavy and light chain variable
regions, and the heavy and light chains are shown.
Antibody B (murine), also referred to as 16G8

| | | |
|---|---|---|
| SEQ ID NO: 17 | HC CDR1 (Combined) | GFTFSNFGMH |
| SEQ ID NO: 18 | HC CDR2 (Combined) | YISSGSSTIYYADTLKG |
| SEQ ID NO: 19 | HC CDR3 (Combined) | RGEGAMDY |
| SEQ ID NO: 57 | HC CDR1 (Kabat) | NFGMH |
| SEQ ID NO: 58 | HC CDR2 (Kabat) | YISSGSSTIYYADTLKG |
| SEQ ID NO: 59 | HC CDR3 (Kabat) | RGEGAMDY |
| SEQ ID NO: 60 | HC CDR1 (Chothia) | GFTFSNF |
| SEQ ID NO: 61 | HC CDR2 (Chothia) | SSGSST |
| SEQ ID NO: 62 | HC CDR3 (Chothia) | RGEGAMDY |
| SEQ ID NO: 15 | VH | DVQLVESGGGLVQPGGSRKLSCAASGFTFSNFG |
| | | MHWVRQAPDKGLEWVAYISSGSSTIYYADTLK |
| | | GRFTISRDNPKNTLFLQMTSLRSEDTAMYYCAR |
| | | RGEGAMDYWGQGTSVTVSS |
| SEQ ID NO: 20 | LC CDR1 (Combined) | RASSSVNYIY |
| SEQ ID NO: 21 | LC CDR2 (Combined) | YTSNLAP |
| SEQ ID NO: 22 | LC CDR3(Combined) | QQFTSSPFT |
| SEQ ID NO: 63 | LC CDR1 (Kabat) | RASSSVNYIY |
| SEQ ID NO: 64 | LC CDR2 (Kabat) | YTSNLAP |
| SEQ ID NO: 65 | LC CDR3 (Kabat) | QQFTSSPFT |
| SEQ ID NO: 66 | LC CDR1 (Chothia) | RASSSVNYIY |
| SEQ ID NO: 67 | LC CDR2 (Chothia) | YTSNLAP |
| SEQ ID NO: 68 | LC CDR3 (Chothia) | QQFTSSPFT |
| SEQ ID NO: 16 | VL | ENVLTQSPAIMSASLGEKVTMSCRASSSVNYIY |
| | | WYQQKSDASPKLWIYYTSNLAPGVPTRFSGSGS |
| | | GNSYSLTISSMEGEDAATYYCQQFTSSPFTFGSG |
| | | TKLEIK |

Antibody B humanized (B-H)
Antibody B-H.1A HC-1

| | | |
|---|---|---|
| SEQ ID NO: 17 | HC CDR1 (Combined) | GFTFSNFGMH |
| SEQ ID NO: 18 | HC CDR2 (Combined) | YISSGSSTIYYADTLKG |
| SEQ ID NO: 19 | HC CDR3 (Combined) | RGEGAMDY |
| SEQ ID NO: 23 | VH | EVOLVESGGGLVQPGGSLRLSCAASGFTFSNFG |
| | | MHWVRQAPGKGLEWVSYISSGSSTIYYADTLKG |
| | | RFTISRDNAKNSLYLQMNSLRAEDTAVYYCARR |
| | | GEGAMDYWGQGTTVTVSS |
| SEQ ID NO: 31 | DNA VH | GAGGTGCAGCTGGTTGAATCTGGCGGAGGATT |
| | | GGTTCAGCCTGGCGGCTCTCTGAGACTGTCTT |
| | | GTGCCGCTTCTGGCTTCACCTTCTCCAACTTCG |
| | | GCATGCACTGGGTCCGACAGGCCCCTGGAAAA |
| | | GGACTGGAATGGGTGTCCTACATCTCCTCCGG |
| | | CTCCTCCACCATCTACTACGCTGACACCCTGA |
| | | AGGGCAGATTCACCATCTCTCGGGACAACGCC |
| | | AAGAACTCCCTGTACCTGCAGATGAACAGCCT |
| | | GAGAGCCGAGGACACCGCCGTGTACTACTGTG |
| | | CTAGAAGAGGCGAGGGCGCCATGGATTATTG |
| | | GGGCCAGGGAACCACAGTGACCGTGTCTAGC |

Antibody B-H.1B HC-2

| | | |
|---|---|---|
| SEQ ID NO: 17 | HC CDR1 (Combined) | GFTFSNFGMH |
| SEQ ID NO: 18 | HC CDR2 (Combined) | YISSGSSTIYYADTLKG |
| SEQ ID NO: 19 | HC CDR3 (Combined) | RGEGAMDY |
| SEQ ID NO: 24 | VH | EVQLVESGGGLVQPGGSLRLSCAASGFTFSNFG |
| | | MHWVRQAPGKGLEWVSYISSGSSTIYYADTLKG |
| | | RFTISRDNSKNTLYLQMNSLRAEDTAVYYCARR |
| | | GEGAMDYWGQGTTVTVSS |
| SEQ ID NO: 32 | DNA VH | GAGGTGCAGCTGGTTGAATCTGGCGGAGGATT |
| | | GGTTCAGCCTGGCGGCTCTCTGAGACTGTCTT |
| | | GTGCCGCTTCTGGCTTCACCTTCTCCAACTTCG |
| | | GCATGCACTGGGTCCGACAGGCCCCTGGAAAA |
| | | GGACTGGAATGGGTGTCCTACATCTCCTCCGG |
| | | CTCCTCCACCATCTACTACGCTGACACCCTGA |
| | | AGGGCAGATTCACCATCAGCCGGGACAACTCC |
| | | AAGAACACCCTGTACCTGCAGATGAACTCCCT |
| | | GAGAGCCGAGGACACCGCCGTGTACTACTGTG |
| | | CTAGAAGAGGCGAGGGCGCCATGGATTATTG |
| | | GGGCCAGGGAACCACAGTGACCGTGTCTAGC |

Antibody B-H.1C HC-3

| | | |
|---|---|---|
| SEQ ID NO: 17 | HC CDR1 (Combined) | GFTFSNFGMH |
| SEQ ID NO: 18 | HC CDR2 (Combined) | YISSGSSTIYYADTLKG |
| SEQ ID NO: 19 | HC CDR3 (Combined) | RGEGAMDY |
| SEQ ID NO: 25 | VH | QVQLVESGGGVVQPGRSLRLSCAASGFTFSNFG |
| | | MHWVRQAPGKGLEWVAYISSGSSTIYYADTLK |
| | | GRFTISRDNSKNTLYLQMNSLRAEDTAVYYCAR |
| | | RGEGAMDYWGQGTTVTVSS |
| SEQ ID NO: 33 | DNA VH | CAGGTGCAGCTGGTGGAATCTGGTGGCGGAGT |
| | | TGTGCAGCCTGGCAGATCCCTGAGACTGTCTT |
| | | GTGCCGCCTCTGGCTTCACCTTCTCCAACTTCG |
| | | GCATGCACTGGGTCCGACAGGCCCCTGGAAAA |
| | | GGATTGGAGTGGGTCGCCTACATCTCCTCCGG |
| | | CTCCTCCACCATCTACTACGCTGACACCCTGA |
| | | AGGGCAGATTCACCATCAGCCGGGACAACTCC |
| | | AAGAACACCCTGTACCTGCAGATGAACTCCCT |
| | | GAGAGCCGAGGACACCGCCGTGTACTACTGTG |
| | | CTAGAAGAGGCGAGGGCGCCATGGATTATTG |
| | | GGGCCAGGGAACCACAGTGACCGTGTCTAGC |

Antibody B-H.1D LC-1

| | | |
|---|---|---|
| SEQ ID NO: 20 | LC CDR1 (Combined) | RASSSVNYIY |
| SEQ ID NO: 21 | LC CDR2 (Combined) | YTSNLAP |
| SEQ ID NO: 22 | LC CDR3(Combined) | QQFTSSPFT |
| SEQ ID NO: 26 | VL | DNQLTQSPSFLSASVGDRVTITCRASSSVNYIYW |
| | | YQQKPGKAPKLLIYYTSNLAPGVPSRFSGSGSGN |
| | | EYTLTISSLQPEDFATYYCQQFTSSPFTFGQGTKL |
| | | EIK |
| SEQ ID NO: 34 | DNA VL | GATAACCAGCTGACCCAGTCTCCTAGCTTCCT |
| | | GTCTGCCTCTGTGGGCGACAGAGTGACAATTA |
| | | CCTGCCGGGCCTCCTCCTCCGTGAACTACATCT |
| | | ACTGGTATCAGCAGAAGCCCGGCAAGGCCCCT |
| | | AAGCTGCTGATCTACTACACCTCCAATCTGGC |
| | | CCCTGGCGTGCCCTCTAGATTTTCCGGATCTGG |
| | | CTCCGGCAACGAGTATACCCTGACAATCTCCA |
| | | GCCTGCAGCCTGAGGACTTCGCCACCTACTAC |
| | | TGCCAGCAGTTCACCTCCTCTCCATTCACCTTT |
| | | GGCCAGGGCACCAAGCTGGAAATCAAA |

Antibody B-H.1E LC-2

| | | |
|---|---|---|
| SEQ ID NO: 20 | LC CDR1 (Combined) | RASSSVNYIY |
| SEQ ID NO: 21 | LC CDR2 (Combined) | YTSNLAP |
| SEQ ID NO: 22 | LC CDR3(Combined) | QQFTSSPFT |
| SEQ ID NO: 27 | VL | DNQLTQSPSSLSASVGDRVTITCRASSSVNYIYW |
| | | YQQKPGKAPKLLIYYTSNLAPGVPSRFSGSGSGN |
| | | DYTLTISSLQPEDFATYYCQQFTSSPFTFGQGTKL |
| | | EIK |
| SEQ ID NO: 35 | DNA VL | ATAACCAGCTGACCCAGTCTCCTTCCAGCCTG |
| | | TCTGCTTCTGTGGGCGACAGAGTGACAATTAC |
| | | CTGCCGGGCCTCCTCCTCCGTGAACTACATCT |
| | | ACTGGTATCAGCAGAAGCCCGGCAAGGCCCCT |
| | | AAGCTGCTGATCTACTACACCTCCAATCTGGC |
| | | CCCTGGCGTGCCCTCTAGATTTTCCGGATCTGG |
| | | CTCCGGCAACGACTATACCCTGACAATCTCCA |
| | | GCCTGCAGCCTGAGGACTTCGCCACCTACTAC |
| | | TGCCAGCAGTTCACCTCCTCTCCATTCACCTTT |
| | | GGCCAGGGCACCAAGCTGGAAATCAAA |

Antibody B-H.1F LC-3

| | | |
|---|---|---|
| SEQ ID NO: 20 | LC CDR1 (Combined) | RASSSVNYIY |
| SEQ ID NO: 21 | LC CDR2 (Combined) | YTSNLAP |
| SEQ ID NO: 22 | LC CDR3(Combined) | QQFTSSPFT |
| SEQ ID NO: 28 | VL | ENVLTQSPATLSVSPGERATLSCRASSSVNYIYW |
| | | YQQKPGQAPRLLIYYTSNLAPGIPARFSGSGSGN |
| | | EYTLTISSLQSEDFAVYYCQQFTSSPFTFGQGTKL |
| | | EIK |
| SEQ ID NO: 36 | DNA VL | GAGAATGTGCTGACCCAGTCTCCTGCCACACT |
| | | GTCTGTTAGCCCTGGCGAGAGAGCTACCCTGA |
| | | GCTGCAGAGCCTCTTCCTCCGTGAACTACATC |
| | | TACTGGTATCAGCAGAAGCCCGGCCAGGCTCC |
| | | TAGACTGCTGATCTACTACACCTCCAATCTGG |
| | | CCCCTGGCATCCCTGCCAGATTTTCCGGATCTG |
| | | GCTCCGGCAACGAGTATACCCTGACCATCTCC |
| | | AGCCTGCAGTCCGAGGACTTTGCTGTGTACTA |
| | | TTGCCAGCAGTTCACAAGCAGCCCTTTCACCT |
| | | TTGGCCAGGGCACCAAGCTGGAAATCAAA |

Antibody B-H.1G LC-4

| | | |
|---|---|---|
| SEQ ID NO: 20 | LC CDR1 (Combined) | RASSSVNYIY |
| SEQ ID NO: 21 | LC CDR2 (Combined) | YTSNLAP |
| SEQ ID NO: 22 | LC CDR3(Combined) | QQFTSSPFT |
| SEQ ID NO: 29 | VL | QNVLTQPPSASGTPGQRVTISCRASSSVNYIYWY |
| | | QQLPGTAPKLLIYYTSNLAPGVPDRFSGSGSGNS |
| | | YSLAISGLRSEDEADYYCQQFTSSPFTFGTGTKV |
| | | TVL |
| SEQ ID NO: 37 | DNA VL | CAGAATGTGCTGACCCAACCTCCTTCCGCCTC |
| | | TGGCACACCTGGACAGAGAGTGACAATCTCCT |
| | | GCCGGGCCTCCTCCTCCGTGAACTACATCTAC |
| | | TGGTATCAGCAGCTGCCCGGCACCGCTCCTAA |
| | | ACTGCTGATCTACTACACCTCCAATCTGGCCC |
| | | CTGGCGTGCCCGATAGATTTTCCGGATCTGGC |
| | | TCCGGCAACTCCTACAGCCTGGCTATCTCTGG |
| | | CCTGAGATCTGAGGACGAGGCCGACTACTACT |
| | | GCCAGCAGTTCACCTCCTCTCCATTCACCTTTG |
| | | GCACCGGCACCAAAGTGACAGTTCTT |

Antibody B-H.1H LC-5

| | | |
|---|---|---|
| SEQ ID NO: 20 | LC CDR1 (Combined) | RASSSVNYIY |
| SEQ ID NO: 21 | LC CDR2 (Combined) | YTSNLAP |
| SEQ ID NO: 22 | LC CDR3 (Combined) | QQFTSSPFT |
| SEQ ID NO: 30 | VL | SNELTQPPSVSVSPGQTARITCRASSSVNYIYWY |
| | | QQKSGQAPVLVIYYTSNLAPGIPERFSGSGSGNM |
| | | YTLTISGAQVEDEADYYCQQFTSSPFTFGTGTKV |
| | | TVL |
| SEQ ID NO: 38 | DNA VL | TCTAATGAGCTGACCCAGCCTCCTTCCGTGTCC |
| | | GTGTCTCCTGGACAGACCGCCAGAATTACCTG |
| | | CCGGGCCTCCTCCTCCGTGAACTACATCTACT |
| | | GGTATCAGCAGAAGTCCGGCCAGGCTCCTGTG |
| | | CTCGTGATCTACTACACCTCCAATCTGGCCCCT |
| | | GGCATCCCTGAGAGATTCTCCGGATCTGGCTC |
| | | CGGCAACATGTACACCCTGACCATCTCTGGCG |
| | | CCCAGGTGGAAGATGAGGCCGACTACTACTGC |
| | | CAGCAGTTCACCTCCTCTCCATTCACCTTTGGC |
| | | ACCGGCACCAAAGTGACAGTTCTT |

Antibody B-H.1

| | | |
|---|---|---|
| SEQ ID NO: | Chain1: Fc only | METDTLLLWVLLLWVPGSTGDKTHTCPPCPAPE |
| 3280 | | LLGGPSVFLFPPKPKDTLMISRTPEVTCVVVDVS |
| | | HEDPEVKFNWYVDGVEVHNAKTKPREEQYNST |
| | | YRVVSVLTVLHQDWLNGKEYKCKVSNKALPAP |
| | | IEKTISKAKGQPREPQVYTLPPCREEMTKNQVSL |
| | | WCLVKGFYPSDIAVEWESNGQPENNYKTTPPVL |
| | | DSDGSFFLYSKLTVDKSRWQQGNVFSCSVMHE |
| | | ALHNRFTQKSLSLSPGK |
| SEQ ID NO: | Chain2: humanized B-H | METDTLLLWVLLLWVPGSTGEVQLVESGGGLV |
| 3281 | scFv | QPGGSLRLSCAASGFTFSNFGMHWVRQAPGKGL |
| | | EWVSYISSGSSTIYYADTLKGRFTISRDNSKNTLY |
| | | LQMNSLRAEDTAVYYCARRGEGAMDYWGQGT |
| | | TVTVSSGGGGSGGGGSGGGGSGGGGSDNQLTQ |
| | | SPSFLSASVGDRVTITCRASSSVNYIYWYQQKPG |
| | | KAPKLLIYYTSNLAPGVPSRFSGSGSGNEYTLTIS |
| | | SLQPEDFATYYCQQFTSSPFTFGQGTKLEIKGGG |
| | | GSDKTHTCPPCPAPELLGGPSVFLFPPKPKDTLMI |
| | | SRTPEVTCVVVDVSHEDPEVKFNWYVDGVEVH |
| | | NAKTKPREEQYNSTYRVVSVLTVLHQDWLNGK |
| | | EYKCKVSNKALPAPIEKTISKAKGQPREPQVCTL |
| | | PPSREEMTKNQVSLSCAVKGFYPSDIAVEWESN |
| | | GQPENNYKTTPPVLDSDGSFFLVSKLTVDKSRW |
| | | QQGNVFSCSVMHEALHNHYTQKSLSLSPGKGG |
| | | GGSGGGGSGLNDIFEAQKIEWHE |
| SEQ ID NO: | scFv | EVQLVESGGGLVQPGGSLRLSCAASGFTFSNFG |
| 7492 | | MHWVRQAPGKGLEWVSYISSGSSTIYYADTLKG |
| | | RFTISRDNSKNTLYLQMNSLRAEDTAVYYCARR |
| | | GEGAMDYWGQGTTVTVSSGGGGSGGGGSGGG |
| | | GSGGGGSDNQLTQSPSFLSASVGDRVTITCRASS |
| | | SVNYIYWYQQKPGKAPKLLIYYTSNLAPGVPSR |
| | | FSGSGSGNEYTLTISSLQPEDFATYYCQQFTSSPF |
| | | TFGQGTKLEIK |

Antibody B-H.2

| | | |
|---|---|---|
| SEQ ID NO: | scFv | EVQLVESGGGLVQPGGSLRLSCAASGFTFSNFG |
| 1338 | | MHWVRQAPGKGLEWVSYISSGSSTIYYADTLKG |
| | | RFTISRDNSKNTLYLQMNSLRAEDTAVYYCARR |
| | | GEGAMDYWGQGTTVTVSSGGGGSGGGGSGGG |
| | | GSGGGGSDNQLTQSPSSLSASVGDRVTITCRASS |
| | | SVNYIYWYQQKPGKAPKLLIYYTSNLAPGVPSR |
| | | FSGSGSGNDYTLTISSLQPEDFATYYCQQFTSSPF |
| | | TFGQGTKLEIK |

Antibody B-H.3

| | | |
|---|---|---|
| SEQ ID NO: | scFv | EVQLVESGGGLVQPGGSLRLSCAASGFTFSNFG |
| 1339 | | MHWVRQAPGKGLEWVSYISSGSSTIYYADTLKG |
| | | RFTISRDNSKNTLYLQMNSLRAEDTAVYYCARR |
| | | GEGAMDYWGQGTTVTVSSGGGGSGGGGSGGG |
| | | GSGGGGSSNELTQPPSVSVSPGQTARITCRASSS |
| | | VNYIYWYQQKSGQAPVLVIYYTSNLAPGIPERFS |
| | | GSGSGNMYTLTISGAQVEDEADYYCQQFTSSPF |
| | | TFGTGTKVTVL |

Antibody B-H.4

| | | |
|---|---|---|
| SEQ ID NO: | scFv | QVQLVESGGGVVQPGRSLRLSCAASGFTFSNFG |
| 1340 | | MHWVRQAPGKGLEWVAYISSGSSTIYYADTLK |
| | | GRFTISRDNSKNTLYLQMNSLRAEDTAVYYCAR |
| | | RGEGAMDYWGQGTTVTVSSGGGGSGGGGSGG |
| | | GGSGGGGSDNQLTQSPSFLSASVGDRVTITCRAS |
| | | SSVNYIYWYQQKPGKAPKLLIYYTSNLAPGVPS |
| | | RFSGSGSGNEYTLTISSLQPEDFATYYCQQFTSSP |
| | | FTFGQGTKLEIK |

Antibody B-H.5

| | | |
|---|---|---|
| SEQ ID NO: | scFv | QVQLVESGGGVVQPGRSLRLSCAASGFTFSNFG |
| 1341 | | MHWVRQAPGKGLEWVAYISSGSSTIYYADTLK |
| | | GRFTISRDNSKNTLYLQMNSLRAEDTAVYYCAR |
| | | RGEGAMDYWGQGTTVTVSSGGGGSGGGGSGG |
| | | GGSGGGGSDNQLTQSPSSLSASVGDRVTITCRAS |
| | | SSVNYIYWYQQKPGKAPKLLIYYTSNLAPGVPS |
| | | RFSGSGSGNDYTLTISSLQPEDFATYYCQQFTSSP |
| | | FTFGQGTKLEIK |

Antibody B-H.6

| | | |
|---|---|---|
| SEQ ID NO: | scFv | QVQLVESGGGVVQPGRSLRLSCAASGFTFSNFG |
| 1342 | | MHWVRQAPGKGLEWVAYISSGSSTIYYADTLK |
| | | GRFTISRDNSKNTLYLQMNSLRAEDTAVYYCAR |
| | | RGEGAMDYWGQGTTVTVSSGGGGSGGGGSGG |
| | | GGSGGGGSSNELTQPPSVSVSPGQTARITCRASS |
| | | SVNYIYWYQQKSGQAPVLVIYYTSNLAPGIPERF |
| | | SGSGSGNMYTLTISGAQVEDEADYYCQQFTSSPF |
| | | TFGTGTKVTVL |

TABLE 32
Constant region amino acid sequences of human IgG heavy chains and human kappa
light chain

| | | |
|---|---|---|
| Human kappa | LC | RTVAAPSVFI FPPSDEQLKS GTASVVCLLN NFYPREAKVQ |
| constant region | | WKVDNALQSG NSQESVTEQD SKDSTYSLSS TLTLSKADYE |
| SEQ ID NO: 39 | | KHKVYACEVT HQGLSSPVTK SFNRGEC |
| IgG4 (S228P) | HC | ASTKGPSVFPLAPCSRSTSESTAALGCLVKDYFPEPVTVSWNSGA |
| mutant constant | | LTSGVHTFPAVLQSSGLYSLSSVVTVPSSSLGTKTYTCNVDHKPS |
| region (EU | | NTKVDKRVESKYGPPCPPCPAPEFLGGPSVFLFPPKPKDTLMISRT |
| Numbering) | | PEVTCVVVDVSQEDPEVQFNWYVDGVEVHNAKTKPREEQFNST |
| SEQ ID NO: 40 | | YRVVSVLTVLHQDWLNGKEYKCKVSNKGLPSSIEKTISKAKGQP |
| | | REPQVYTLPPSQEEMTKNQVSLTCLVKGFYPSDIAVEWESNGQPE |
| | | NNYKTTPPVLDSDGSFFLYSRLTVDKSRWQEGNVFSCSVMHEAL |
| | | HNHYTQKSLSLSLG |
| IgG1 wild type | HC | ASTKGPSVFPLAPSSKSTSGGTAALGCLVKDYFPEPVTVSWNSGA |
| SEQ ID NO: 41 | | LTSGVHTFPAVLQSSGLYSLSSVVTVPSSSLGTQTYICNVNHKPSN |
| | | TKVDKRVEPKSCDKTHTCPPCPAPELLGGPSVFLFPPKPKDTLMIS |
| | | RTPEVTCVVVDVSHEDPEVKFNWYVDGVEVHNAKTKPREEQYN |
| | | STYRVVSVLTVLHQDWLNGKEYKCKVSNKALPAPIEKTISKAKG |
| | | QPREPQVYTLPPSREEMTKNQVSLTCLVKGFYPSDIAVEWESNGQ |
| | | PENNYKTTPPVLDSDGSFFLYSKLTVDKSRWQQGNVFSCSVMHE |
| | | ALHNHYTQKSLSLSPGK |
| IgG1 (N297A) | HC | ASTKGPSVFPLAPSSKSTSGGTAALGCLVKDYFPEPVTVSWNSGA |
| mutant constant | | LTSGVHTFPAVLQSSGLYSLSSVVTVPSSSLGTQTYICNVNHKPSN |
| region (EU | | TKVDKRVEPKSCDKTHTCPPCPAPELLGGPSVFLFPPKPKDTLMIS |
| Numbering) | | RTPEVTCVVVDVSHEDPEVKFNWYVDGVEVHNAKTKPREEQYA |
| SEQ ID NO: 42 | | STYRVVSVLTVLHQDWLNGKEYKCKVSNKALPAPIEKTISKAKG |
| | | QPREPQVYTLPPSREEMTKNQVSLTCLVKGFYPSDIAVEWESNGQ |
| | | PENNYKTTPPVLDSDGSFFLYSKLTVDKSRWQQGNVFSCSVMHE |
| | | ALHNHYTQKSLSLSPGK |
| IgM constant | HC | GSASAPTLFPLVSCENSPSDTSSVAVGCLAQDFLPDSITFSWKYKN |
| delta CDC | | NSDISSTRGFPSVLRGGKYAATSQVLLPSKDVMQGTDEHVVCKV |
| (P311A, P313S) | | QHPNGNKEKNVPLPVIAELPPKVSVFVPPRDGFFGNPRKSKLICQ |
| SEQ ID NO: 73 | | ATGFSPRQIQVSWLREGKQVGSGVTTDQVQAEAKESGPTTYKVT |
| | | STLTIKESDWLGQSMFTCRVDHRGLTFQQNASSMCVPDQDTAIR |
| | | VFAIPPSFASIFLTKSTKLTCLVTDLTTYDSVTISWTRQNGEAVKT |
| | | HTNISESHPNATFSAVGEASICEDDWNSGERFTCTVTHTDLASSL |
| | | KQTISRPKGVALHRPDVYLLPPAREQLNLRESATITCLVTGFSPAD |
| | | VFVQWMQRGQPLSPEKYVTSAPMPEPQAPGRYFAHSILTVSEEE |
| | | WNTGETYTCVVAHEALPNRVTERTVDKSTGKPTLYNVSLVMSD |
| | | TAGTCY |
| IgGA1 | HC | ASPTSPKVFPLSLCSTQPDGNVVIACLVQGFFPQEPLSVTWSESGQ |
| SEQ ID NO: 74 | | GVTARNFPPSQDASGDLYTTSSQLTLPATQCLAGKSVTCHVKHY |
| | | TNPSQDVTVPCPVPSTPPTPSPSTPPTPSPSCCHPRLSLHRPALEDL |
| | | LLGSEANLTCTLTGLRDASGVTFTWTPSSGKSAVQGPPERDLCGC |
| | | YSVSSVLPGCAEPWNHGKTFTCTAAYPESKTPLTATLSKSGNTFR |
| | | PEVHLLPPPSEELALNELVTLTCLARGFSPKDVLVRWLQGSQELP |
| | | REKYLTWASRQEPSQGTTTFAVTSILRVAAEDWKKGDTFSCMVG |
| | | HEALPLAFTQKTIDRLAGKPTHVNVSVVMAEVDGTCY |
| IgGA2 | HC | ASPTSPKVFPLSLDSTPQDGNVVVACLVQGFFPQEPLSVTWSESG |
| SEQ ID NO: 75 | | QNVTARNFPPSQDASGDLYTTSSQLTLPATQCPDGKSVTCHVKH |
| | | YTNSSQDVTVPCRVPPPPPCCHPRLSLHRPALEDLLLGSEANLTCT |
| | | LTGLRDASGATFTWTPSSGKSAVQGPPERDLCGCYSVSSVLPGCA |
| | | QPWNHGETFTCTAAHPELKTPLTANITKSGNTFRPEVHLLPPPSEE |
| | | LALNELVTLTCLARGFSPKDVLVRWLQGSQELPREKYLTWASRQ |
| | | EPSQGTTTYAVTSILRVAAEDWKKGETFSCMVGHEALPLAFTQK |
| | | TIDRMAGKPTHINVSVVMAEADGTCY |
| Human Ig_J | HC | MKNHLLFWGVLAVFIKAVHVKAQEDERIVLVDNKCKCARITSRII |
| chain | | RSSEDPNEDIVERNIRIIVPLNNRENISDPTSPLRTRFVYHLSDLCK |
| SEQ ID NO: 76 | | KCDPTEVELDNQIVTATQSNICDEDSATETCYTYDRNKCYTAVVP |
| | | LVYGGETKMVETALTPDACYPD |

### Anti-TCRβ V5 Antibodies

[0647] Accordingly, in one aspect, the disclosure provides an anti-TCRβV antibody molecule that binds to human TCRβ V5. In some embodiments, the TCRβ V5 subfamily comprises TCRβ V5-5*01, TCRβ V5-6*01, TCRβ V5-4*01, TCRβ V5-8*01, TCRβ V5-1*01, or a variant thereof.

[0648] Exemplary anti-TCRβ V5 antibodies of the disclosure are provided in Table 33. In some embodiments, the anti-TCRβ3 VS is antibody C, e.g., humanized antibody C (antibody C-H), as provided in Table 33. In some embodiments, the anti-TCRβV antibody comprises one or more (e.g., all three) of a LC CDR, LC CDR2, and LC CDR3 provided in Table 33; and/or one or more (e.g., all three) of a HC CDR1, HC CDR2, and HC CDR3 provided in Table 33, or a sequence with at least 95% identity thereto. In some embodiments, antibody C comprises a variable heavy chain (VH) and/or a variable light chain (VL) provided in Table 33, or a sequence with at least 95% identity thereto.

TABLE 33
Amino acid sequences for anti TCRβ V5 antibodies
Amino acid and nucleotide sequences for murine and humanized antibody molecules which bind to
TCRVB 5 (e.g., TCRVB 5-5 or TCRVB 5-6). The amino acid the heavy and light chain CDRs, and the
amino acid and nucleotide sequences of the heavy and light chain variable regions, and the
heavy and light chains are shown.
Murine antibody C, also referred to as 4H11

| | | |
|---|---|---|
| SEQ ID NO: 1315 | HC CDR1 (Kabat) | AYGVN |
| SEQ ID NO: 1316 | HC CDR2 (Kabat) | MIWGDGNTDYNSALKS |
| SEQ ID NO: 1317 | HC CDR3 (Kabat) | DRVTATLYAMDY |
| SEQ ID NO: 1318 | HC CDR1 (Chothia) | GFSLTAY |
| SEQ ID NO: 1319 | HC CDR2 (Chothia) | WGDGN |
| SEQ ID NO: 1317 | HC CDR3 (Chothia) | DRVTATLYAMDY |
| SEQ ID NO: 1320 | HC CDR1 (Combined) | GFSLTAYGVN |
| SEQ ID NO: 1316 | HC CDR2 (Combined) | MIWGDGNTDYNSALKS |
| SEQ ID NO: 1317 | HC CDR3(Combined) | DRVTATLYAMDY |
| SEQ ID NO: 1321 | LC CDR1 (Kabat) | SASQGISNYLN |
| SEQ ID NO: 1322 | LC CDR2 (Kabat) | YTSSLHS |
| SEQ ID NO: 1323 | LC CDR3 (Kabat) | QQYSKLPRT |
| SEQ ID NO: 1321 | LC CDR1 (Chothia) | SASQGISNYLN |
| SEQ ID NO: 1322 | LC CDR2 (Chothia) | YTSSLHS |
| SEQ ID NO: 1323 | LC CDR3 (Chothia) | QQYSKLPRT |
| SEQ ID NO: 1321 | LC CDR1 (Combined) | SASQGISNYLN |
| SEQ ID NO: 1322 | LC CDR2 (Combined) | YTSSLHS |
| SEQ ID NO: 1323 | LC CDR3(Combined) | QQYSKLPRT |
| SEQ ID NO: 232 | VH | DIQMTQTTSSLSASLGDRVTISCSASQGISNY |
| | | LNWYQQKPDGTVKLLIYYTSSLHSGVPSRFS |
| | | GSGSGTDYSLTISNLEPEDIATYYCQQYSKLP |
| | | RTFGGGTKVEIK |
| SEQ ID NO: 7488 | VL | QVQLKESGPGLVAPSQSLSITCTVSGFSLTAY |
| | | GVNWVRQPPGKGLEWLGMIWGDGNTDYN |
| | | SALKSRLSISKDNSKSQVFLKMNSLQTDDTA |
| | | RYYCARDRVTATLYAMDYWGQGTSVTVSS |

Humanized antibody C
C-H-1 antibody

| | | |
|---|---|---|
| SEQ ID NO: 1315 | HC CDR1 (Kabat) | AYGVN |
| SEQ ID NO: 1316 | HC CDR2 (Kabat) | MIWGDGNTDYNSALKS |
| SEQ ID NO: 1317 | HC CDR3 (Kabat) | DRVTATLYAMDY |
| SEQ ID NO: 1318 | HC CDR1 (Chothia) | GFSLTAY |
| SEQ ID NO: 1319 | HC CDR2 (Chothia) | WGDGN |
| SEQ ID NO: 1317 | HC CDR3 (Chothia) | DRVTATLYAMDY |
| SEQ ID NO: 1320 | HC CDR1 (Combined) | GFSLTAYGVN |
| SEQ ID NO: 1316 | HC CDR2 (Combined) | MIWGDGNTDYNSALKS |
| SEQ ID NO: 1317 | HC CDR3(Combined) | DRVTATLYAMDY |
| SEQ ID NO: 1321 | LC CDR1 (Kabat) | SASQGISNYLN |
| SEQ ID NO: 1322 | LC CDR2 (Kabat) | YTSSLHS |
| SEQ ID NO: 1323 | LC CDR3 (Kabat) | QQYSKLPRT |
| SEQ ID NO: 1321 | LC CDR1 (Chothia) | SASQGISNYLN |
| SEQ ID NO: 1322 | LC CDR2 (Chothia) | YTSSLHS |
| SEQ ID NO: 1323 | LC CDR3 (Chothia) | QQYSKLPRT |
| SEQ ID NO: 1321 | LC CDR1 (Combined) | SASQGISNYLN |
| SEQ ID NO: 1322 | LC CDR2 (Combined) | YTSSLHS |
| SEQ ID NO: 1323 | LC CDR3(Combined) | QQYSKLPRT |
| SEQ ID NO: 1324 | VL | DIQMTQSPSSLSASVGDRVTITCSASQGISNYL |
| | | NWYQQTPGKAPKLLIYYTSSLHSGVPSRFSGS |
| | | GSGTDYTFTISSLQPEDIATYYCQQYSKLPRT |
| | | FGQGTKLQIT |
| SEQ ID NO: 1325 | VH | QVQLQESGPGLVRPSQTLSLTCTVSGFSLTA |
| | | YGVNWVRQPPGRGLEWLGMIWGDGNTDY |
| | | NSALKSRVTMLKDTSKNQFSLRLSSVTAAD |
| | | TAVYYCARDRVTATLYAMDYW |
| | | GQGSLVTVSS |

Humanized antibody C Variable light chain (VL)

| | | | |
|---|---|---|---|
| SEQ ID NO: 3000 | VL | C-H-VL.1 | DIQMTQSPSFLSASVGDRVTITCSASQGISNY |
| | | | LNWYQQKPGKAVKLLIYYTSSLHSGVPSRFS |
| | | | GSGSGTEYTLTISSLQPEDFATYYCQQYSKL |
| | | | PRTFGGGTKVEIK |
| SEQ ID NO: 3001 | VL | C-H-VL.2 | DIQMTQSPSFLSASVGDRVTITCSASQGISNY |
| | | | LNWYQQKPGKAVKLLIYYTSSLHSGVPSRFS |
| | | | GSGSGTDYTLTISSLQPEDFATYYCQQYSKL |
| | | | PRTFGGGTKVEIK |
| SEQ ID NO: 3002 | VL | C-H-VL.3 | DIQMTQSPSSLSASVGDRVTITCSASQGISNY |
| | | | LNWYQQKPGKVVKLLIYYTSSLHSGVPSRFS |
| | | | GSGSGTDYTLTISSLQPEDVATYYCQQYSKL |
| | | | PRTFGGGTKVEIK |
| SEQ ID NO: 3003 | VL | C-H-VL.4 | DIQMTQSPSSLSASVGDRVTITCSASQGISNY |
| | | | LNWYQQKPGQAVKLLIYYTSSLHSGVPSRFS |
| | | | GSGSGTDYTLTISSLQPEDVATYYCQQYSKL |
| | | | PRTFGGGTKVEIK |
| SEQ ID NO: 3004 | VL | C-H-VL.5 | DIQMTQSPSSLSASVGDRVTITCSASQGISNY |
| | | | LNWYQQKPGKAVKLLIYYTSSLHSGVPSRFS |
| | | | GSGSGTDYTFTISSLQPEDIATYYCQQYSKLP |
| | | | RTFGGGTKVEIK |
| SEQ ID NO: 3005 | VL | C-H-VL.6 | DIQMTQSPSSLSASVGDRVTITCSASQGISNY |
| | | | LNWYQQKPGKTVKLLIYYTSSLHSGIPSRFS |
| | | | GSGSGTDYTLTIRSLQPEDFATYYCQQYSKL |
| | | | PRTFGGGTKVEIK |
| SEQ ID NO: 3006 | VL | C-H-VL.7 | AIQMTQSPSSLSASVGDRVTITCSASQGISNY |
| | | | LNWYQQKPGKAVKLLIYYTSSLHSGVPSRFS |
| | | | GSGSGTDYTLTISSLQPEDFATYYCQQYSKL |
| | | | PRTFGGGTKVEIK |
| SEQ ID NO: 3007 | VL | C-H-VL.8 | DIQMTQSPSSVSASVGDRVTITCSASQGISNY |
| | | | LNWYQQKPGKAVKLLIYYTSSLHSGVPSRFS |
| | | | GSGSGTDYTLTISSLQPEDFATYYCQQYSKL |
| | | | PRTFGGGTKVEIK |
| SEQ ID NO: 3008 | VL | C-H-VL.9 | DIQMTQSPSSLSASVGDRVTITCSASQGISNY |
| | | | LNWYQQKPGKAVKRLIYYTSSLHSGVPSRF |
| | | | SGSGSGTEYTLTISNLQPEDFATYYCQQYSK |
| | | | LPRTFGGGTKVEIK |
| SEQ ID NO: 3009 | VL | C-H-VL.10 | AIRMTQSPFSLSASVGDRVTITCSASQGISNY |
| | | | LNWYQQKPAKAVKLFIYYTSSLHSGVPSRFS |
| | | | GSGSGTDYTLTISSLQPEDFATYYCQQYSKL |
| | | | PRTFGGGTKVEIK |
| SEQ ID NO: 3010 | VL | C-H-VL.11 | DIQMTQSPSSLSASVGDRVTITCSASQGISNY |
| | | | LNWYQQKPGKAVKRLIYYTSSLHSGVPSRF |
| | | | SGSGSGTEYTLTISSLQPEDFATYYCQQYSK |
| | | | LPRTFGGGTKVEIK |
| SEQ ID NO: 3011 | VL | C-H-VL.12 | DIQMTQSPSTLSASVGDRVTITCSASQGISNY |
| | | | LNWYQQKPGKAVKLLIYYTSSLHSGVPSRFS |
| | | | GSGSGTEYTLTISSLQPDDFATYYCQQYSKL |
| | | | PRTFGGGTKVEIK |
| SEQ ID NO:3012 | VL | C-H-VL.13 | DIQMTQSPSSLSASVGDRVTITCSASQGISNY |
| | | | LNWYQQKPGKAVKSLIYYTSSLHSGVPSRFS |
| | | | GSGSGTDYTLTISSLQPEDFATYYCQQYSKL |
| | | | PRTFGGGTKVEIK |
| SEQ ID NO: 3013 | VL | C-H-VL.14 | DIQMTQSPSSLSASVGDRVTITCSASQGISNY |
| | | | LNWYQQKPGKAVKSLIYYTSSLHSGVPSKFS |
| | | | GSGSGTDYTLTISSLQPEDFATYYCQQYSKL |
| | | | PRTFGGGTKVEIK |
| SEQ ID NO: 3014 | VL | C-H-VL.15 | DIQMTQSPSSLSASVGDRVTITCSASQGISNY |
| | | | LNWYQQKPEKAVKSLIYYTSSLHSGVPSRFS |
| | | | GSGSGTDYTLTISSLQPEDFATYYCQQYSKL |
| | | | PRTFGGGTKVEIK |
| SEQ ID NO: 3015 | VL | C-H-VL.16 | DIQMTQSPSAMSASVGDRVTITCSASQGISN |
| | | | YLNWYQQKPGKVVKRLIYYTSSLHSGVPSR |
| | | | FSGSGSGTEYTLTISSLQPEDFATYYCQQYSK |
| | | | LPRTFGGGTKVEIK |
| SEQ ID NO: 3016 | VL | C-H-VL.17 | DIVMTQSPDSLAVSLGERATINCSASQGISNY |
| | | | LNWYQQKPGQPVKLLIYYTSSLHSGVPDRFS |
| | | | GSGSGTDYTLTISSLQAEDVAVYYCQQYSK |
| | | | LPRTFGGGTKVEIK |
| SEQ ID NO: 3017 | VL | C-H-VL.18 | EIVMTQSPGTLSLSPGERATLSCSASQGISNY |
| | | | LNWYQQKPGQAVKLLIYYTSSLHSGIPDRFS |
| | | | GSGSGTDYTLTISRLEPEDFAVYYCQQYSKL |
| | | | PRTFGGGTKVEIK |
| SEQ ID NO: 3018 | VL | C-H-VL.19 | EIVMTQSPPTLSLSPGERVTLSCSASQGISNY |
| | | | LNWYQQKPGQAVKLLIYYTSSLHSGIPARFS |
| | | | GSGSGTDYTLTISSLQPEDFAVYYCQQYSKL |
| | | | PRTFGGGTKVEIK |
| SEQ ID NO: 3019 | VL | C-H-VL.20 | EIVMTQSPPTLSLSPGERVTLSCSASQGISNY |
| | | | LNWYQQKPGQAVKLLIYYTSSLHSSIPARFS |
| | | | GSGSGTDYTLTISSLQPEDFAVYYCQQYSKL |
| | | | PRTFGGGTKVEIK |
| SEQ ID NO: 3020 | VL | C-H-VL.21 | EIVMTQSPATLSLSPGERATLSCSASQGISNY |
| | | | LNWYQQKPGQAVKLLIYYTSSLHSGIPARFS |
| | | | GSGSGTDYTLTISSLEPEDFAVYYCQQYSKL |
| | | | PRTFGGGTKVEIK |
| SEQ ID NO: 3021 | VL | C-H-VL.22 | EIVMTQSPATLSLSPGERATLSCSASQGISNY |
| | | | LNWYQQKPGQAVKLLIYYTSSLHSGIPARFS |
| | | | GSGSGTDYTLTISRLEPEDFAVYYCQQYSKL |
| | | | PRTFGGGTKVEIK |
| SEQ ID NO: 3022 | VL | C-H-VL.23 | EIVMTQSPATLSLSPGERATLSCSASQGISNY |
| | | | LNWYQQKPGQAVKLLIYYTSSLHSGIPDRFS |
| | | | GSGSGTDYTLTISRLEPEDFAVYYCQQYSKL |
| | | | PRTFGGGTKVEIK |
| SEQ ID NO: 3023 | VL | C-H-VL.24 | EIVMTQSPATLSLSPGERATLSCSASQGISNY |
| | | | LNWYQQKPGLAVKLLIYYTSSLHSGIPDRFS |
| | | | GSGSGTDYTLTISRLEPEDFAVYYCQQYSKL |
| | | | PRTFGGGTKVEIK |
| SEQ ID NO: 3024 | VL | C-H-VL.25 | DIQMIQSPSFLSASVGDRVSIICSASQGISNYL |
| | | | NWYLQKPGKSVKLFIYYTSSLHSGVSSRFSG |
| | | | RGSGTDYTLTIISLKPEDFAAYYCQQYSKLP |
| | | | RTFGGGTKVEIK |
| SEQ ID NO: 3025 | VL | C-H-VL.26 | EIVMTQSPATLSLSPGERATLSCSASQGISNY |
| | | | LNWYQQKPGQAVKLLIYYTSSLHSGIPARFS |
| | | | GSGSGTDYTLTISSLQPEDFAVYYCQQYSKL |
| | | | PRTFGGGTKVEIK |
| SEQ ID NO: 3026 | VL | C-H-VL.27 | EIVMTQSPATLSLSPGERATLSCSASQGISNY |
| | | | LNWYQQKPGQAVKLLIYYTSSLHSGIPARFS |
| | | | GSGPGTDYTLTISSLEPEDFAVYYCQQYSKL |
| | | | PRTFGGGTKVEIK |
| SEQ ID NO: 3027 | VL | C-H-VL.28 | DIVMTQTPLSLSVTPGQPASISCSASQGISNY |
| | | | LNWYLQKPGQSVKLLIYYTSSLHSGVPDRFS |
| | | | GSGSGTDYTLKISRVEAEDVGVYYCQQYSK |
| | | | LPRTFGGGTKVEIK |
| SEQ ID NO: 3028 | VL | C-H-VL.29 | DIVMTQTPLSLSVTPGQPASISCSASQGISNY |
| | | | LNWYLQKPGQPVKLLIYYTSSLHSGVPDRFS |
| | | | GSGSGTDYTLKISRVEAEDVGVYYCQQYSK |
| | | | LPRTFGGGTKVEIK |
| SEQ ID NO: 3029 | VL | C-H-VL.30 | DIVMTQSPAFLSVTPGEKVTITCSASQGISNY |
| | | | LNWYQQKPDQAVKLLIYYTSSLHSGVPSRFS |
| | | | GSGSGTDYTFTISSLEAEDAATYYCQQYSKL |
| | | | PRTFGGGTKVEIK |
| SEQ ID NO: 3030 | VL | C-H-VL.31 | DIVMTQSPLSLPVTPGEPASISCSASQGISNYL |
| | | | NWYLQKPGQSVKLLIYYTSSLHSGVPDRFSG |
| | | | SGSGTDYTLKISRVEAEDVGVYYCQQYSKL |
| | | | PRTFGGGTKVEIK |
| SEQ ID NO: 3031 | VL | C-H-VL.32 | DIVMTQTPLSLPVTPGEPASISCSASQGISNY |
| | | | LNWYLQKPGQSVKLLIYYTSSLHSGVPDRFS |
| | | | GSGSGTDYTLKISRVEAEDVGVYYCQQYSK |
| | | | LPRTFGGGTKVEIK |
| SEQ ID NO: 3032 | VL | C-H-VL.33 | EIVMTQSPATLSVSPGERATLSCSASQGISNY |
| | | | LNWYQQKPGQAVKLLIYYTSSLHSGIPARFS |
| | | | GSGSGTEYTLTISILQSEDFAVYYCQQYSKLP |
| | | | RTFGGGTKVEIK |
| SEQ ID NO: 3033 | VL | C-H-VL.34 | EIVMTQSPATLSVSPGERATLSCSASQGISNY |
| | | | LNWYQQKPGQAVKLLIYYTSSLHSGIPARFS |
| | | | GSGSGTEYTLTISSLQSEDFAVYYCQQYSKL |
| | | | PRTFGGGTKVEIK |
| SEQ ID NO: 3034 | VL | C-H-VL.35 | DIVMTQSPLSLPVTLGQPASISCSASQGISNY |
| | | | LNWYQQRPGQSVKRLIYYTSSLHSGVPDRFS |
| | | | GSGSGTDYTLKISRVEAEDVGVYYCQQYSK |
| | | | LPRTFGGGTKVEIK |
| SEQ ID NO: 3035 | VL | C-H-VL.36 | EITMTQSPAFMSATPGDKVNISCSASQGISNY |
| | | | LNWYQQKPGEAVKFIIYYTSSLHSGIPPRFSG |
| | | | SGYGTDYTLTINNIESEDAAYYYCQQYSKLP |
| | | | RTFGGGTKVEIK |
| SEQ ID NO: 3036 | VL | C-H-VL.37 | DIVMTQTPLSSPVTLGQPASISCSASQGISNY |
| | | | LNWYQQRPGQPVKLLIYYTSSLHSGVPDRFS |
| | | | GSGAGTDYTLKISRVEAEDVGVYYCQQYSK |
| | | | LPRTFGGGTKVEIK |
| SEQ ID NO: 3037 | VL | C-H-VL.38 | EIVMTQSPDFQSVTPKEKVTITCSASQGISNY |
| | | | LNWYQQKPDQSVKLLIYYTSSLHSGVPSRFS |
| | | | GSGSGTDYTLTINSLEAEDAATYYCQQYSKL |
| | | | PRTFGGGTKVEIK |
| SEQ ID NO: 3038 | VL | C-H-VL.39 | EIVMTQTPLSLSITPGEQASISCSASQGISNYL |
| | | | NWYLQKARPVVKLLIYYTSSLHSGVPDRFS |
| | | | GSGSGTDYTLKISRVEAEDFGVYYCQQYSK |
| | | | LPRTFGGGTKVEIK |
| SEQ ID NO: 3039 | VL | C-H-VL.40 | EIVMTQTPLSLSITPGEQASMSCSASQGISNY |
| | | | LNWYLQKARPVVKLLIYYTSSLHSGVPDRFS |
| | | | GSGSGTDYTLKISRVEAEDFGVYYCQQYSK |
| | | | LPRTFGGGTKVEIK |

Humanized antibody C Variable HEAVY chain (VH)

| | | | |
|---|---|---|---|
| SEQ ID NO: 3040 | VH | C-H-VH.1 | QVTLKESGPVLVKPTETLTLTCTVSGFSLTA |
| | | | YGVNWVRQPPGKALEWLGMIWGDGNTDY |
| | | | NSALKSRLTISKDNSKSQVVLTMTNMDPVD |
| | | | TATYYCARDRVTATLYAMDYWGQGTLVTV |
| | | | SS |
| SEQ ID NO: 3041 | VH | C-H-VH.2 | QVTLKESGPALVKPTETLTLTCTVSGFSLTA |
| | | | YGVNWVRQPPGKALEWLGMIWGDGNTDY |
| | | | NSALKSRLIISKDNSKSQVVLTMTNMDPVDT |
| | | | ATYYCARDRVTATLYAMDYWGQGTLVTVS |
| | | | S |
| SEQ ID NO: 3042 | VH | C-H-VH.3 | QVTLKESGPALVKPTQTLTLTCTVSGFSLTA |
| | | | YGVNWVRQPPGKALEWLGMIWGDGNTDY |
| | | | NSALKSRLTISKDNSKSQVVLTMTNMDPVD |
| | | | TATYYCARDRVTATLYAMDYWGQGTLVTV |
| | | | SS |
| SEQ ID NO: 3043 | VH | C-H-VH.4 | QVQLQESGPGLVKPSGTLSLTCAVSGFSLTA |
| | | | YGVNWVRQPPGKGLEWLGMIWGDGNTDY |
| | | | NSALKSRLTISKDNSKSQVSLKLSSVTAADT |
| | | | AVYYCARDRVTATLYAMDYWGQGTLVTV |
| | | | SS |
| SEQ ID NO: 3044 | VH | C-H-VH.5 | QVTLKESGPTLVKPTQTLTLTCTVSGFSLTA |
| | | | YGVNWVRQPPGKALEWLGMIWGDGNTDY |
| | | | NSALKSRLTITKDNSKSQVVLTMTNMDPVD |
| | | | TATYYCARDRVTATLYAMDYWGQGTLVTV |
| | | | SS |
| SEQ ID NO: 3045 | VH | C-H-VH.6 | QVTLKESGPALVKPTQTLTLTCTVSGFSLTA |
| | | | YGVNWVRQPPGKALEWLGMIWGDGNTDY |
| | | | NSALKSRLTITKDNSKSQVVLTMTNMDPVD |
| | | | TATYYCARDRVTATLYAMDYWGQGTLVTV |
| | | | SS |
| SEQ ID NO: 3046 | VH | C-H-VH.7 | QVQLQESGPGLVKPSQTLSLTCTVSGFSLTA |
| | | | YGVNWVRQPPGKGLEWLGMIWGDGNTDY |
| | | | NSALKSRLTISKDNSKSQVSLKLSSVTAADT |
| | | | AVYYCARDRVTATLYAMDYWGQGTLVTV |
| | | | SS |
| SEQ ID NO: 3047 | VH | C-H-VH.8 | QVQLQESGPGLVKPSETLSLTCTVSGFSLTA |
| | | | YGVNWVRQPPGKGLEWLGMIWGDGNTDY |
| | | | NSALKSRLTISKDNSKSQVSLKLSSVTAADT |
| | | | AVYYCARDRVTATLYAMDYWGQGTLVTV |
| | | | SS |
| SEQ ID NO: 3048 | VH | C-H-VH.9 | QVQLQESGPGLVKPSQTLSLTCAVSGFSLTA |
| | | | YGVNWVRQPPGKGLEWLGMIWGDGNTDY |
| | | | NSALKSRLTISKDNSKSQVSLKLSSVTAADT |
| | | | AVYYCARDRVTATLYAMDYWGQGTLVTV |
| | | | SS |
| SEQ ID NO: 3049 | VH | C-H-VH.10 | QVQLQESGPGLVKPSDTLSLTCTVSGFSLTA |
| | | | YGVNWVRQPPGKGLEWLGMIWGDGNTDY |
| | | | NSALKSRLTISKDNSKSQVSLKLSSVTAADT |
| | | | AVYYCARDRVTATLYAMDYWGQGTLVTV |
| | | | SS |
| SEQ ID NO: 3050 | VH | C-H-VH.11 | QVQLQESGPGLVKPSQTLSLTCTVSGFSLTA |
| | | | YGVNWVRQHPGKGLEWLGMIWGDGNTDY |
| | | | NSALKSRLTISKDNSKSQVSLKLSSVTAADT |
| | | | AVYYCARDRVTATLYAMDYWGQGTLVTV |
| | | | SS |
| SEQ ID NO: 3051 | VH | C-H-VH.12 | QVQLQESGPGLVKPSQTLSLTCTVSGFSLTA |
| | | | YGVNWVRQPAGKGLEWLGMIWGDGNTDY |
| | | | NSALKSRLTISKDNSKSQVSLKLSSVTAADT |
| | | | AVYYCARDRVTATLYAMDYWGQGTLVTV |
| | | | SS |
| SEQ ID NO: 3052 | VH | C-H-VH.13 | QVQLQESGPGLVKPSQTLSLTCAVSGFSLTA |
| | | | YGVNWVRQPPGKGLEWLGMIWGDGNTDY |
| | | | NSALKSRLTISKDNSKSQVSLKLSSVTAVDT |
| | | | AVYYCARDRVTATLYAMDYWGQGTLVTV |
| | | | SS |
| SEQ ID NO: 3053 | VH | C-H-VH.14 | QVQLQESGPGLVKPSETLSLTCTVSGFSLTA |
| | | | YGVNWVRQPPGKGLEWLGMIWGDGNTDY |
| | | | NSALKSRLTISKDNSKSHVSLKLSSVTAADT |
| | | | AVYYCARDRVTATLYAMDYWGQGTLVTV |
| | | | SS |
| SEQ ID NO: 3054 | VH | C-H-VH.15 | QVQLQESGPGLVKPSETLSLTCAVSGFSLTA |
| | | | YGVNWVRQPPGKGLEWLGMIWGDGNTDY |
| | | | NSALKSRLTISKDNSKSQVSLKLSSVTAADT |
| | | | AVYYCARDRVTATLYAMDYWGQGTLVTV |
| | | | SS |
| SEQ ID NO: 3055 | VH | C-H-VH.16 | QVQLQESGPGLVKPSQTLSLTCAVYGFSLTA |
| | | | YGVNWVRQPPGKGLEWLGMIWGDGNTDY |
| | | | NSALKSRLTISKDNSKSQVSLKLSSVTAADT |
| | | | AVYYCARDRVTATLYAMDYWGQGTLVTV |
| | | | SS |
| SEQ ID NO: 3056 | VH | C-H-VH.17 | RVQLQESGPGLVKPSETLSLTCTVSGFSLTA |
| | | | YGVNWVRQPPGKGLEWLGMIWGDGNTDY |
| | | | NSALKSRLTISKDNSKSQVPLKLSSVTAADT |
| | | | AVYYCARDRVTATLYAMDYWGQGTLVTV |
| | | | SS |
| SEQ ID NO: 3057 | VH | C-H-VH.18 | QVQLQESGPGLVKPSQTLSLTCTVSGFSLTA |
| | | | YGVNWVRQHPGKGLEWLGMIWGDGNTDY |
| | | | NSALKSLLTISKDNSKSQVSLKLSSVTAADT |
| | | | AVYYCARDRVTATLYAMDYWGQGTLVTV |
| | | | SS |
| SEQ ID NO: 3058 | VH | C-H-VH.19 | QVQLQESGPGLVKPSDTLSLTCAVSGFSLTA |
| | | | YGVNWVRQPPGKGLEWLGMIWGDGNTDY |
| | | | NSALKSRLTISKDNSKSQVSLKLSSVTALDT |
| | | | AVYYCARDRVTATLYAMDYWGQGTLVTV |
| | | | SS |
| SEQ ID NO: 3059 | VH | C-H-VH.20 | QVQLQESGPGLVKPSDTLSLTCAVSGFSLTA |
| | | | YGVNWVRQPPGKGLEWLGMIWGDGNTDY |
| | | | NSALKSRLTISKDNSKSQVSLKLSSVTAVDT |
| | | | AVYYCARDRVTATLYAMDYWGQGTLVTV |
| | | | SS |
| SEQ ID NO: 3060 | VH | C-H-VH.21 | QVQLQESGSGLVKPSQTLSLTCAVSGFSLTA |
| | | | YGVNWVRQPPGKGLEWLGMIWGDGNTDY |
| | | | NSALKSRLTISKDNSKSQVSLKLSSVTAADT |
| | | | AVYYCARDRVTATLYAMDYWGQGTLVTV |
| | | | SS |
| SEQ ID NO: 3061 | VH | C-H-VH.22 | EVOLVESGGGLVQPGRSLRLSCTVSGFSLTA |
| | | | YGVNWVRQAPGKGLEWLGMIWGDGNTDY |
| | | | NSALKSRLTISKDNSKSIVYLQMNSLKTEDT |
| | | | AVYYCARDRVTATLYAMDYWGQGTLVTV |
| | | | SS |
| SEQ ID NO: 3062 | VH | C-H-VH.23 | EVOLVESGGGLVQPGPSLRLSCTVSGFSLTA |
| | | | YGVNWVRQAPGKGLEWLGMIWGDGNTDY |
| | | | NSALKSRLTISKDNSKSIVYLQMNSLKTEDT |
| | | | AVYYCARDRVTATLYAMDYWGQGTLVTV |
| | | | SS |
| SEQ ID NO: 3063 | VH | C-H-VH.24 | QVQLQESGSGLVKPSQTLSLTCAVSGFSLTA |
| | | | YGVNWVRQSPGKGLEWLGMIWGDGNTDY |
| | | | NSALKSRLTISKDNSKSQVSLKLSSVTAADT |
| | | | AVYYCARDRVTATLYAMDYWGQGTLVTV |
| | | | SS |
| SEQ ID NO: 3064 | VH | C-H-VH.25 | QVQLQESGPGLVKPSETLSLTCTVSGFSLTA |
| | | | YGVNWVRQPAGKGLEWLGMIWGDGNTDY |
| | | | NSALKSRLTISKDNSKSQVSLKLSSVTAADT |
| | | | AVYYCARDRVTATLYAMDYWGQGTLVTV |
| | | | SS |
| SEQ ID NO: 3065 | VH | C-H-VH.26 | EVOLVESGGGLVKPGRSLRLSCTVSGFSLTA |
| | | | YGVNWVRQAPGKGLEWLGMIWGDGNTDY |
| | | | NSALKSRLTISKDNSKSIVYLQMNSLKTEDT |
| | | | AVYYCARDRVTATLYAMDYWGQGTLVTV |
| | | | SS |
| SEQ ID NO: 3066 | VH | C-H-VH.27 | QVQLQESGPGLVKPSETLSLTCAVYGFSLTA |
| | | | YGVNWVRQPPGKGLEWLGMIWGDGNTDY |
| | | | NSALKSRLTISKDNSKSQVYLKLSSVTAADT |
| | | | AVYYCARDRVTATLYAMDYWGQGTLVTV |
| | | | SS |
| SEQ ID NO: 3067 | VH | C-H-VH.28 | QVQLQESGPGLVKPSDTLSLTCAVSGFSLTA |
| | | | YGVNWVRQPPGKGLEWLGMIWGDGNTDY |
| | | | NSALKSRLTISKDNSKSQVSLKLSSVTAVDT |
| | | | GVYYCARDRVTATLYAMDYWGQGTLVTV |
| | | | SS |
| SEQ ID NO: 3068 | VH | C-H-VH.29 | EVQLVESGGGLVQPGGSLRLSCAVSGFSLTA |
| | | | YGVNWVRQAPGKGLEWLGMIWGDGNTDY |
| | | | NSALKSRLTISKDNSKSSVYLQMNSLKTEDT |
| | | | AVYYCARDRVTATLYAMDYWGQGTLVTV |
| | | | SS |
| SEQ ID NO: 3069 | VH | C-H-VH.30 | EVOLVESGGGLVKPGGSLRLSCAVSGFSLTA |
| | | | YGVNWVRQAPGKGLEWLGMIWGDGNTDY |
| | | | NSALKSRLTISKDNSKSTVYLQMNSLKTEDT |
| | | | AVYYCARDRVTATLYAMDYWGQGTLVTV |
| | | | SS |
| SEQ ID NO: 3070 | VH | C-H-VH.31 | QVQLQQSGPGLVKPSQTLSLTCAVSGFSLTA |
| | | | YGVNWVRQSPSRGLEWLGMIWGDGNTDY |
| | | | NSALKSRLTINKDNSKSQVSLQLNSVTPEDT |
| | | | AVYYCARDRVTATLYAMDYWGQGTLVTV |
| | | | SS |
| SEQ ID NO: 3071 | VH | C-H-VH.32 | QVQLVESGGGLVQPGGSLRLSCSVSGFSLTA |
| | | | YGVNWVRQAPGKGLEWLGMIWGDGNTDY |
| | | | NSALKSRLTISKDNSKSTVYLQMNSLRAEDT |
| | | | AVYYCARDRVTATLYAMDYWGQGTLVTV |
| | | | SS |
| SEQ ID NO: 3072 | VH | C-H-VH.33 | QVQLQQWGAGLLKPSETLSLTCAVYGFSLT |
| | | | AYGVNWVRQPPGKGLEWLGMIWGDGNTD |
| | | | YNSALKSRLTISKDNSKSQVSLKLSSVTAAD |
| | | | TAVYYCARDRVTATLYAMDYWGQGTLVT |
| | | | VSS |
| SEQ ID NO: 3073 | VH | C-H-VH.34 | QVQLVESGGGVVQPGRSLRLSCAVSGFSLT |
| | | | AYGVNWVRQAPGKGLEWLGMIWGDGNTD |
| | | | YNSALKSRLTISKDNSTSTVFLQMNSLRAED |
| | | | TAVYYCARDRVTATLYAMDYWGQGTLVT |
| | | | VSS |
| SEQ ID NO: 3074 | VH | C-H-VH.35 | EVOLVESGGGLVQPGGSLRLSCAVSGFSLTA |
| | | | YGVNWVRQAPGKGLEWLGMIWGDGNTDY |
| | | | NSALKSRLTISKDNSKSTVYLQMNSLRAEDT |
| | | | AVYYCARDRVTATLYAMDYWGQGTLVTV |
| | | | SS |
| SEQ ID NO: 3075 | VH | C-H-VH.36 | EVOLVESGGGLVQPGGSLRLSCAVSGFSLTA |
| | | | YGVNWVRQAPGKGLEWLGMIWGDGNTDY |
| | | | NSALKSRLTISKDNAKSSVYLQMNSLRDEDT |
| | | | AVYYCARDRVTATLYAMDYWGQGTLVTV |
| | | | SS |
| SEQ ID NO: 3076 | VH | C-H-VH.37 | EVQLLESGGGLVQPGGSLRLSCAVSGFSLTA |
| | | | YGVNWVRQAPGKGLEWLGMIWGDGNTDY |
| | | | NSALKSRLTISKDNSKSTVYLQMNSLRAEDT |
| | | | AVYYCARDRVTATLYAMDYWGQGTLVTV |
| | | | SS |
| SEQ ID NO: 3077 | VH | C-H-VH.38 | QVQLVESGGGLVKPGGSLRLSCAVSGFSLT |
| | | | AYGVNWVRQAPGKGLEWLGMIWGDGNTD |
| | | | YNSALKSRLTISKDNAKSSVYLQMNSLRAE |
| | | | DTAVYYCARDRVTATLYAMDYWGQGTLV |
| | | | TVSS |
| SEQ ID NO: 3078 | VH | C-H-VH.39 | EVOLVESGGGLVQPGGSLKLSCAVSGFSLTA |
| | | | YGVNWVRQASGKGLEWLGMIWGDGNTDY |
| | | | NSALKSRLTISKDNSKSTVYLQMNSLKTEDT |
| | | | AVYYCARDRVTATLYAMDYWGQGTLVTV |
| | | | SS |
| SEQ ID NO: 3079 | VH | C-H-VH.40 | QVQLLESGGGLVKPGGSLRLSCAVSGFSLTA |
| | | | YGVNWVRQAPGKGLEWLGMIWGDGNTDY |
| | | | NSALKSRLTISKDNAKSSVYLQMNSLRAEDT |
| | | | AVYYCARDRVTATLYAMDYWGQGTLVTV |
| | | | SS |
| SEQ ID NO: 3080 | VH | C-H-VH.41 | QVQLVESGGGVVQPGRSLRLSCAVSGFSLT |
| | | | AYGVNWVRQAPGKGLEWLGMIWGDGNTD |
| | | | YNSALKSRLTISKDNSKSTVYLQMNSLRAED |
| | | | TAVYYCARDRVTATLYAMDYWGQGTLVT |
| | | | VSS |
| SEQ ID NO: 3081 | VH | C-H-VH.42 | QVQLVESGGGVVQPGRSLRLSCAVSGFSLT |
| | | | AYGVNWVRQAPGKGLEWLGMIWGDGNTD |
| | | | YNSALKSRLTISKDNSKSRVYLQMNSLRAE |
| | | | DTAVYYCARDRVTATLYAMDYWGQGTLV |
| | | | TVSS |
| SEQ ID NO: 3082 | VH | C-H-VH.43 | QVQLVESGGGVVQPGRSLRLSCAVSGFSLT |
| | | | AYGVNWVRQAPGKGLEWLGMIWGDGNTD |
| | | | YNSALKSRLAISKDNSKSTVYLQMNSLRAE |
| | | | DTAVYYCARDRVTATLYAMDYWGQGTLV |
| | | | TVSS |
| SEQ ID NO: 3083 | VH | C-H-VH.44 | QVQLVESGGGVVQPGGSLRLSCAVSGFSLT |
| | | | AYGVNWVRQAPGKGLEWLGMIWGDGNTD |
| | | | YNSALKSRLTISKDNSKSTVYLQMNSLRAED |
| | | | TAVYYCARDRVTATLYAMDYWGQGTLVT |
| | | | VSS |
| SEQ ID NO: 3084 | VH | C-H-VH.45 | EVOLVESGGGLVQPGGSLRLSCAVSGFSLTA |
| | | | YGVNWVRQAPGKGLEWLGMIWGDGNTDY |
| | | | NSALKSRLTISKDNAKSTVYLQMNSLRAED |
| | | | TAVYYCARDRVTATLYAMDYWGQGTLVT |
| | | | VSS |
| SEQ ID NO: 3085 | VH | C-H-VH.46 | EVOLVESGGGLVQPGGSLRLSCAVSGFSLTA |
| | | | YGVNWVRQAPGKGLEWLGMIWGDGNTDY |
| | | | NSALKSRLTISKDNAKSSVYLQMNSLRAEDT |
| | | | AVYYCARDRVTATLYAMDYWGQGTLVTV |
| | | | SS |
| SEQ ID NO: 3086 | VH | C-H-VH.47 | EVOLVESGGVVVQPGGSLRLSCAVSGFSLT |
| | | | AYGVNWVRQAPGKGLEWLGMIWGDGNTD |
| | | | YNSALKSRLTISKDNSKSSVYLQMNSLRTED |
| | | | TALYYCARDRVTATLYAMDYWGQGTLVTV |
| | | | SS |
| SEQ ID NO: 3087 | VH | C-H-VH.48 | EVOLVESGGGLVQPGGSLRLSCAVSGFSLTA |
| | | | YGVNWVRQAPGKGLEWLGMIWGDGNTDY |
| | | | NSALKSRLTISKHNSKSTVYLQMNSLRAEDT |
| | | | AVYYCARDRVTATLYAMDYWGQGTLVTV |
| | | | SS |
| SEQ ID NO: 3088 | VH | C-H-VH.49 | EVOLVESGGGLVKPGGSLRLSCAVSGFSLTA |
| | | | YGVNWVRQAPGKGLEWLGMIWGDGNTDY |
| | | | NSALKSRLTISKDNAKSSVYLQMNSLRAEDT |
| | | | AVYYCARDRVTATLYAMDYWGQGTLVTV |
| | | | SS |
| SEQ ID NO: 3089 | VH | C-H-VH.50 | EVOLVESGGGLIQPGGSLRLSCAVSGFSLTA |
| | | | YGVNWVRQPPGKGLEWLGMIWGDGNTDY |
| | | | NSALKSRLTISKDNSKSTVYLQMNSLRAEDT |
| | | | AVYYCARDRVTATLYAMDYWGQGTLVTV |
| | | | SS |

[0649] Exemplary anti-TCRβ V5 antibodies of the disclosure are provided in Table 11. In some embodiments, the anti-TCRβ V5 is antibody E, e.g., humanized antibody E (antibody E-H), as provided in Table 11. In some embodiments, the anti-TCRβV antibody comprises one or more (e.g., all three) of a LC CDR1, LC CDR2, and LC CDR3 provided in Table 11; and/or one or more (e.g., all three) of a HC CDR1, HC CDR2, and HC CDR3 provided in Table 11, or a sequence with at least 95 identity thereto. In some embodiments, antibody E comprises a variable heavy chain (VH) and/or a variable light chain (VL) provided in Table 11, or a sequence with at least 95% identity thereto.

[0650] In some embodiments, antibody E comprises a heavy chain comprising the amino acid sequence of SEQ ID NO: 3284 and/or a light chain comprising the amino acid sequence of SEQ ID NO: 3285, or a sequence with at least 95% identity thereto.

TABLE 11
Amino acid sequences for anti TCRβ V5 antibodies
Amino acid and nucleotide sequences for murine and humanized antibody molecules which bind to
TCRVB 5 (e.g., TCRVB 5-5 or TCRVB 5-6). The amino acid the heavy and light chain CDRs, and
the amino acid and nucleotide sequences of the heavy and light chain variable regions, and
the heavy and light chains are shown.
Murine antibody E, also referred to as MH3-2

| | | |
|---|---|---|
| SEQ ID NO: 1298 | HC CDR1 (Kabat) | SSWMN |
| SEQ ID NO: 1299 | HC CDR2 (Kabat) | RIYPGDGDTKYNGKFKG |
| SEQ ID NO: 1300 | HC CDR3 (Kabat) | RGTGGWYFDV |
| SEQ ID NO: 1302 | HC CDR1 (Chothia) | GYAFSSS |
| SEQ ID NO: 1303 | HC CDR2 (Chothia) | YPGDGD |
| SEQ ID NO: 1301 | HC CDR3 (Chothia) | RGTGGWYFDV |
| SEQ ID NO: 1304 | HC CDR1 (Combined) | GYAFSSSWMN |
| SEQ ID NO: 1299 | HC CDR2 (Combined)) | RIYPGDGDTKYNGKFKG |
| SEQ ID NO: 1301 | HC CDR3(Combined) | RGTGGWYFDV |
| SEQ ID NO: 1305 | LC CDR1 (Kabat) | RASESVDSSGNSFMH |
| SEQ ID NO: 1306 | LC CDR2 (Kabat) | RASNLES |
| SEQ ID NO: 1307 | LC CDR3 (Kabat) | QQSFDDPFT |
| SEQ ID NO: 1308 | LC CDR1 (Chothia) | SESVDSSGNSF |
| SEQ ID NO: 1306 | LC CDR2 (Chothia) | RASNLES |
| SEQ ID NO: 1307 | LC CDR3 (Chothia) | QQSFDDPFT |
| SEQ ID NO: 1305 | LC CDR1 (Combined) | RASESVDSSGNSFMH |
| SEQ ID NO: 1306 | LC CDR2 (Combined) | RASNLES |
| SEQ ID NO: 1307 | LC CDR3(Combined) | QQSFDDPFT |
| SEQ ID NO: 3091 | VH | QVQLQQSGPELVKPGASVKISCKASGYAFSSS |
| | | WMNWVKQRPGQGLEWIGRIYPGDGDTKYN |
| | | GKFKGKATLTADKSSSTAYMHLSSLTSVDSA |
| | | VYFCARRGTGGWYFDVWGAGTTVTVSS |
| SEQ ID NO: 3284 | Heavy chain | METDTLLLWVLLLWVPGSTGQVQLQQSGPEL |
| | | VKPGASVKISCKASGYAFSSSWMNWVKQRP |
| | | GQGLEWIGRIYPGDGDTKYNGKFKGKATLTA |
| | | DKSSSTAYMHLSSLTSVDSAVYFCARRGTGG |
| | | WYFDVWGAGTTVTVSSAKTTAPSVYPLAPV |
| | | CGDTTGSSVTLGCLVKGYFPEPVTLTWNSGS |
| | | LSSGVHTFPAVLQSDLYTLSSSVTVTSSTWPS |
| | | QSITCNVAHPASSTKVDKKIEPRGPTIKPCPPC |
| | | KCPAPNLLGGPSVFIFPPKIKDVLMISLSPIVTC |
| | | VVVDVSEDDPDVQISWFVNNVEVHTAQTQT |
| | | HREDYNSTLRVVSALPIQHQDWMSGKEFKCK |
| | | VNNKDLPAPIERTISKPKGSVRAPQVYVLPPPE |
| | | EEMTKKQVTLTCMVTDFMPEDIYVEWTNNG |
| | | KTELNYKNTEPVLDSDGSYFMYSKLRVEKKN |
| | | WVERNSYSCSVVHEGLHNHHTTKSFSRTPGK |
| SEQ ID NO: 3092 | VL | DIVLTQSPASLAVSLGQRATISCRASESVDSSG |
| | | NSFMHWYQQKPGQPPQLLIYRASNLESGIPAR |
| | | FSGSGSRTDFTLTINPVEADDVATFYCQQSFD |
| | | DPFTFGSGTKLEIK |
| SEQ ID NO: 3285 | Light chain | METDTLLLWVLLLWVPGSTGDIVLTQSPASL |
| | | AVSLGQRATISCRASESVDSSGNSFMHWYQQ |
| | | KPGQPPQLLIYRASNLESGIPARFSGSGSRTDF |
| | | TLTINPVEADDVATFYCQQSFDDPFTFGSGTK |
| | | LEIKRADAAPTVSIFPPSSEQLTSGGASVVCFL |
| | | NNFYPKDINVKWKIDGSERQNGVLNSWTDQ |
| | | DSKDSTYSMSSTLTLTKDEYERHNSYTCEAT |
| | | HKTSTSPIVKSFNRNEC |

Humanized antibody E (E-H antibody)
Variable light chain (VL)

| | | | |
|---|---|---|---|
| SEQ ID NO: 3093 | VL | E-H.1 | DIVLTQSPDSLAVSLGERATINCRASESVDSSG |
| | | | NSFMHWYQQKPGQPPQLLIYRASNLESGVPD |
| | | | RFSGSGSRTDFTLTISSLQAEDVAVYYCQQSF |
| | | | DDPFTFGQGTKLEIK |
| SEQ ID NO: 3094 | VL | E-H.2 | EIVLTQSPATLSLSPGERATLSCRASESVDSSG |
| | | | NSFMHWYQQKPGQAPQLLIYRASNLESGIPA |
| | | | RFSGSGSRTDFTLTISSLEPEDFAVYYCQQSFD |
| | | | DPFTFGQGTKLEIK |
| SEQ ID NO: 3095 | VL | E-H.3 | EIVLTQSPATLSLSPGERATLSCRASESVDSSG |
| | | | NSFMHWYQQKPGQAPQLLIYRASNLESGIPA |
| | | | RFSGSGSRTDFTLTISRLEPEDFAVYYCQQSFD |
| | | | DPFTFGQGTKLEIK |
| SEQ ID NO: 3096 | VL | E-H.4 | EIVLTQSPATLSLSPGERATLSCRASESVDSSG |
| | | | NSFMHWYQQKPGQAPQLLIYRASNLESGIPA |
| | | | RFSGSGSRTDFTLTISSLQPEDFAVYYCQQSFD |
| | | | DPFTFGQGTKLEIK |
| SEQ ID NO: 3097 | VL | E-H.5 | DIQLTQSPSSLSASVGDRVTITCRASESVDSSG |
| | | | NSFMHWYQQKPGQAPQLLIYRASNLESGVPS |
| | | | RFSGSGSRTDFTLTISSLQPEDVATYYCQQSFD |
| | | | DPFTFGQGTKLEIK |
| SEQ ID NO: 3098 | VL | E-H.6 | EIVLTQSPATLSLSPGERATLSCRASESVDSSG |
| | | | NSFMHWYQQKPGQAPQLLIYRASNLESGIPA |
| | | | RFSGSGPRTDFTLTISSLEPEDFAVYYCQQSFD |
| | | | DPFTFGQGTKLEIK |
| SEQ ID NO: 3099 | VL | E-H.7 | EIVLTQSPATLSLSPGERATLSCRASESVDSSG |
| | | | NSFMHWYQQKPGQAPQLLIYRASNLESGIPD |
| | | | RFSGSGSRTDFTLTISRLEPEDFAVYYCQQSFD |
| | | | DPFTFGQGTKLEIK |
| SEQ ID NO: 3100 | VL | E-H.8 | DIQLTQSPSSLSASVGDRVTITCRASESVDSSG |
| | | | NSFMHWYQQKPGKVPQLLIYRASNLESGVPS |
| | | | RFSGSGSRTDFTLTISSLQPEDVATYYCQQSFD |
| | | | DPFTFGQGTKLEIK |
| SEQ ID NO: 3101 | VL | E-H.9 | DIQLTQSPSSLSASVGDRVTITCRASESVDSSG |
| | | | NSFMHWYQQKPGKTPQLLIYRASNLESGIPSR |
| | | | FSGSGSRTDFTLTIRSLQPEDFATYYCQQSFDD |
| | | | PFTFGQGTKLEIK |
| SEQ ID NO: 3102 | VL | E-H.10 | EIVLTQSPGTLSLSPGERATLSCRASESVDSSG |
| | | | NSFMHWYQQKPGQAPQLLIYRASNLESGIPD |
| | | | RFSGSGSRTDFTLTISRLEPEDFAVYYCQQSFD |
| | | | DPFTFGQGTKLEIK |
| SEQ ID NO: 3103 | VL | E-H.11 | EIVLTQSPATLSLSPGERATLSCRASESVDSSG |
| | | | NSFMHWYQQKPGLAPQLLIYRASNLESGIPDR |
| | | | FSGSGSRTDFTLTISRLEPEDFAVYYCQQSFDD |
| | | | PFTFGQGTKLEIK |
| SEQ ID NO: 3104 | VL | E-H.12 | DIQLTQSPSSLSASVGDRVTITCRASESVDSSG |
| | | | NSFMHWYQQKPGKAPQLLIYRASNLESGVPS |
| | | | RFSGSGSRTDFTLTISSLQPEDFATYYCQQSFD |
| | | | DPFTFGQGTKLEIK |
| SEQ ID NO: 3105 | VL | E-H.13 | DIQLTQSPSSVSASVGDRVTITCRASESVDSSG |
| | | | NSFMHWYQQKPGKAPQLLIYRASNLESGVPS |
| | | | RFSGSGSRTDFTLTISSLQPEDFATYYCQQSFD |
| | | | DPFTFGQGTKLEIK |
| SEQ ID NO: 3106 | VL | E-H.14 | AIQLTQSPSSLSASVGDRVTITCRASESVDSSG |
| | | | NSFMHWYQQKPGKAPQLLIYRASNLESGVPS |
| | | | RFSGSGSRTDFTLTISSLQPEDFATYYCQQSFD |
| | | | DPFTFGQGTKLEIK |
| SEQ ID NO: 3107 | VL | E-H.15 | DIQLTQSPSFLSASVGDRVTITCRASESVDSSG |
| | | | NSFMHWYQQKPGKAPQLLIYRASNLESGVPS |
| | | | RFSGSGSRTEFTLTISSLQPEDFATYYCQQSFD |
| | | | DPFTFGQGTKLEIK |
| SEQ ID NO: 3108 | VL | E-H.16 | DIQLTQSPSSLSASVGDRVTITCRASESVDSSG |
| | | | NSFMHWYQQKPGKAPQLLIYRASNLESGVPS |
| | | | RFSGSGSRTDFTFTISSLQPEDIATYYCQQSFD |
| | | | DPFTFGQGTKLEIK |
| SEQ ID NO: 3109 | VL | E-H.17 | EIVLTQSPATLSVSPGERATLSCRASESVDSSG |
| | | | NSFMHWYQQKPGQAPQLLIYRASNLESGIPA |
| | | | RFSGSGSRTEFTLTISILQSEDFAVYYCQQSFD |
| | | | DPFTFGQGTKLEIK |
| SEQ ID NO: 3110 | VL | E-H.18 | EIVLTQSPATLSVSPGERATLSCRASESVDSSG |
| | | | NSFMHWYQQKPGQAPQLLIYRASNLESGIPA |
| | | | RFSGSGSRTEFTLTISSLQSEDFAVYYCQQSFD |
| | | | DPFTFGQGTKLEIK |
| SEQ ID NO: 3111 | VL | E-H.19 | AIRLTQSPFSLSASVGDRVTITCRASESVDSSG |
| | | | NSFMHWYQQKPAKAPQLFIYRASNLESGVPS |
| | | | RFSGSGSRTDFTLTISSLQPEDFATYYCQQSFD |
| | | | DPFTFGQGTKLEIK |
| SEQ ID NO: 3112 | VL | E-H.20 | DIQLTQSPSSLSASVGDRVTITCRASESVDSSG |
| | | | NSFMHWYQQKPGKAPQSLIYRASNLESGVPS |
| | | | RFSGSGSRTDFTLTISSLQPEDFATYYCQQSFD |
| | | | DPFTFGQGTKLEIK |
| SEQ ID NO: 3113 | VL | E-H.21 | DIQLTQSPSSLSASVGDRVTITCRASESVDSSG |
| | | | NSFMHWYQQKPGKAPQRLIYRASNLESGVPS |
| | | | RFSGSGSRTEFTLTISNLQPEDFATYYCQQSFD |
| | | | DPFTFGQGTKLEIK |
| SEQ ID NO: 3114 | VL | E-H.22 | DIQLTQSPSTLSASVGDRVTITCRASESVDSSG |
| | | | NSFMHWYQQKPGKAPQLLIYRASNLESGVPS |
| | | | RFSGSGSRTEFTLTISSLQPDDFATYYCQQSFD |
| | | | DPFTFGQGTKLEIK |
| SEQ ID NO: 3115 | VL | E-H.23 | EIVLTQSPDFQSVTPKEKVTITCRASESVDSSG |
| | | | NSFMHWYQQKPDQSPQLLIYRASNLESGVPS |
| | | | RFSGSGSRTDFTLTINSLEAEDAATYYCQQSF |
| | | | DDPFTFGQGTKLEIK |
| SEQ ID NO: 3116 | VL | E-H.24 | DIQLTQSPSSLSASVGDRVTITCRASESVDSSG |
| | | | NSFMHWYQQKPGKAPQSLIYRASNLESGVPS |
| | | | KFSGSGSRTDFTLTISSLQPEDFATYYCQQSFD |
| | | | DPFTFGQGTKLEIK |
| SEQ ID NO: 3117 | VL | E-H.25 | DIQLTQSPSSLSASVGDRVTITCRASESVDSSG |
| | | | NSFMHWYQQKPGKAPQRLIYRASNLESGVPS |
| | | | RFSGSGSRTEFTLTISSLQPEDFATYYCQQSFD |
| | | | DPFTFGQGTKLEIK |
| SEQ ID NO: 3118 | VL | E-H.26 | DIVLTQTPLSLSVTPGQPASISCRASESVDSSG |
| | | | NSFMHWYLQKPGQPPQLLIYRASNLESGVPD |
| | | | RFSGSGSRTDFTLKISRVEAEDVGVYYCQQSF |
| | | | DDPFTFGQGTKLEIK |
| SEQ ID NO: 3119 | VL | E-H.27 | DIQLTQSPSSLSASVGDRVTITCRASESVDSSG |
| | | | NSFMHWYQQKPEKAPQSLIYRASNLESGVPS |
| | | | RFSGSGSRTDFTLTISSLQPEDFATYYCQQSFD |
| | | | DPFTFGQGTKLEIK |
| SEQ ID NO: 3120 | VL | E-H.28 | EIVLTQSPPTLSLSPGERVTLSCRASESVDSSG |
| | | | NSFMHWYQQKPGQAPQLLIYRASNLESGIPA |
| | | | RFSGSGSRTDFTLTISSLQPEDFAVYYCQQSFD |
| | | | DPFTFGQGTKLEIK |
| SEQ ID NO: 3121 | VL | E-H.29 | DIQLTQSPSAMSASVGDRVTITCRASESVDSS |
| | | | GNSFMHWYQQKPGKVPQRLIYRASNLESGVP |
| | | | SRFSGSGSRTEFTLTISSLQPEDFATYYCQQSF |
| | | | DDPFTFGQGTKLEIK |
| SEQ ID NO:3122 | VL | E-H.30 | DIVLTQSPLSLPVTPGEPASISCRASESVDSSGN |
| | | | SFMHWYLQKPGQSPQLLIYRASNLESGVPDR |
| | | | FSGSGSRTDFTLKISRVEAEDVGVYYCQQSFD |
| | | | DPFTFGQGTKLEIK |
| SEQ ID NO: 3123 | VL | E-H.31 | DIVLTQTPLSLPVTPGEPASISCRASESVDSSG |
| | | | NSFMHWYLQKPGQSPQLLIYRASNLESGVPD |
| | | | RFSGSGSRTDFTLKISRVEAEDVGVYYCQQSF |
| | | | DDPFTFGQGTKLEIK |
| SEQ ID NO: 3124 | VL | E-H.32 | DIVLTQTPLSLSVTPGQPASISCRASESVDSSG |
| | | | NSFMHWYLQKPGQSPQLLIYRASNLESGVPD |
| | | | RFSGSGSRTDFTLKISRVEAEDVGVYYCQQSF |
| | | | DDPFTFGQGTKLEIK |
| SEQ ID NO: 3125 | VL | E-H.33 | EIVLTQSPPTLSLSPGERVTLSCRASESVDSSG |
| | | | NSFMHWYQQKPGQAPQLLIYRASNLESSIPAR |
| | | | FSGSGSRTDFTLTISSLQPEDFAVYYCQQSFDD |
| | | | PFTFGQGTKLEIK |
| SEQ ID NO: 3126 | VL | E-H.34 | DIVLTQSPLSLPVTLGQPASISCRASESVDSSG |
| | | | NSFMHWYQQRPGQSPQRLIYRASNLESGVPD |
| | | | RFSGSGSRTDFTLKISRVEAEDVGVYYCQQSF |
| | | | DDPFTFGQGTKLEIK |
| SEQ ID NO: 3127 | VL | E-H.35 | DIVLTQTPLSSPVTLGQPASISCRASESVDSSG |
| | | | NSFMHWYQQRPGQPPQLLIYRASNLESGVPD |
| | | | RFSGSGARTDFTLKISRVEAEDVGVYYCQQSF |
| | | | DDPFTFGQGTKLEIK |
| SEQ ID NO: 3128 | VL | E-H.36 | DIVLTQSPAFLSVTPGEKVTITCRASESVDSSG |
| | | | NSFMHWYQQKPDQAPQLLIYRASNLESGVPS |
| | | | RFSGSGSRTDFTFTISSLEAEDAATYYCQQSFD |
| | | | DPFTFGQGTKLEIK |
| SEQ ID NO: 3129 | VL | E-H.37 | DIQLIQSPSFLSASVGDRVSIICRASESVDSSGN |
| | | | SFMHWYLQKPGKSPQLFIYRASNLESGVSSRF |
| | | | SGRGSRTDFTLTIISLKPEDFAAYYCQQSFDDP |
| | | | FTFGQGTKLEIK |
| SEQ ID NO: 3130 | VL | E-H.38 | EIVLTQTPLSLSITPGEQASISCRASESVDSSGN |
| | | | SFMHWYLQKARPVPQLLIYRASNLESGVPDR |
| | | | FSGSGSRTDFTLKISRVEAEDFGVYYCQQSFD |
| | | | DPFTFGQGTKLEIK |
| SEQ ID NO: 3131 | VL | E-H.39 | EIVLTQTPLSLSITPGEQASMSCRASESVDSSG |
| | | | NSFMHWYLQKARPVPQLLIYRASNLESGVPD |
| | | | RFSGSGSRTDFTLKISRVEAEDFGVYYCQQSF |
| | | | DDPFTFGQGTKLEIK |
| SEQ ID NO: 3132 | VL | E-H.40 | EITLTQSPAFMSATPGDKVNISCRASESVDSSG |
| | | | NSFMHWYQQKPGEAPQFIIYRASNLESGIPPR |
| | | | FSGSGYRTDFTLTINNIESEDAAYYYCQQSFD |
| | | | DPFTFGQGTKLEIK |

Variable HEAVY chain (VH)

| | | | |
|---|---|---|---|
| SEQ ID NO: 3133 | VH | E-H.1 | QVQLVQSGAEVKKPGASVKVSCKASGYAFSS |
| | | | SWMNWVRQAPGQGLEWIGRIYPGDGDTKYN |
| | | | GKFKGRATLTADKSTSTAYMELSSLRSEDTA |
| | | | VYYCARRGTGGWYFDVWGQGTTVTVSS |
| SEQ ID NO: 3134 | VH | E-H.2 | QVQLVQSGAEVKKPGSSVKVSCKASGYAFSS |
| | | | SWMNWVRQAPGQGLEWIGRIYPGDGDTKYN |
| | | | GKFKGRATLTADKSTSTAYMELSSLRSEDTA |
| | | | VYYCARRGTGGWYFDVWGQGTTVTVSS |
| SEQ ID NO: 3135 | VH | E-H.3 | QVQLVQSGAEVKKPGASVKVSCKASGYAFSS |
| | | | SWMNWVRQAPGKGLEWIGRIYPGDGDTKYN |
| | | | GKFKGRATLTADKSTSTAYMELSSLRSEDTA |
| | | | VYYCARRGTGGWYFDVWGQGTTVTVSS |
| SEQ ID NO: 3136 | VH | E-H.4 | QVQLVQSGAEVKKPGASVKVSCKASGYAFSS |
| | | | SWMNWVRQAPGQELEWIGRIYPGDGDTKYN |
| | | | GKFKGRATLTADKSISTAYMELSSLRSEDTAT |
| | | | YYCARRGTGGWYFDVWGQGTTVTVSS |
| SEQ ID NO: 3137 | VH | E-H.5 | EVQLVQSGAEVKKPGATVKISCKASGYAFSSS |
| | | | WMNWVQQAPGKGLEWIGRIYPGDGDTKYN |
| | | | GKFKGRATLTADKSTSTAYMELSSLRSEDTA |
| | | | VYYCARRGTGGWYFDVWGQGTTVTVSS |
| SEQ ID NO: 3138 | VH | E-H.6 | QVQLVQSGAEVKKTGSSVKVSCKASGYAFSS |
| | | | SWMNWVRQAPGQALEWIGRIYPGDGDTKYN |
| | | | GKFKGRATLTADKSMSTAYMELSSLRSEDTA |
| | | | MYYCARRGTGGWYFDVWGQGTTVTVSS |
| SEQ ID NO: 3139 | VH | E-H.7 | QVQLVQSGAEVKKPGASVKVSCKASGYAFSS |
| | | | SWMNWVRQAPGQRLEWIGRIYPGDGDTKYN |
| | | | GKFKGRATLTADKSASTAYMELSSLRSEDMA |
| | | | VYYCARRGTGGWYFDVWGQGTTVTVSS |
| SEQ ID NO: 3140 | VH | E-H.8 | QVQLVQSGAEVKKPGASVKVSCKASGYAFSS |
| | | | SWMNWVRQAPGQGLEWIGRIYPGDGDTKYN |
| | | | GKFKGRATLTADKSTSTAYMELRSLRSDDMA |
| | | | VYYCARRGTGGWYFDVWGQGTTVTVSS |
| SEQ ID NO: 3141 | VH | E-H.9 | QVQLVQSGAEVKKPGASVKVSCKASGYAFSS |
| | | | SWMNWVRQAPGQRLEWIGRIYPGDGDTKYN |
| | | | GKFKGRATLTADKSASTAYMELSSLRSEDTA |
| | | | VYYCARRGTGGWYFDVWGQGTTVTVSS |
| SEQ ID NO: 3142 | VH | E-H.10 | QVQLVQSGAEVKKPGASVKVSCKASGYAFSS |
| | | | SWMNWVRQAPGQGLEWIGRIYPGDGDTKYN |
| | | | GKFKGRATLTADKSTSTAYMELRSLRSDDTA |
| | | | VYYCARRGTGGWYFDVWGQGTTVTVSS |
| SEQ ID NO: 3143 | VH | E-H.11 | QVQLVQSGAEVKKPGASVKVSCKASGYAFSS |
| | | | SWMNWVRQAPGQGLEWIGRIYPGDGDTKYN |
| | | | GKFKGRATLTADKSISTAYMELSRLRSDDTA |
| | | | VYYCARRGTGGWYFDVWGQGTTVTVSS |
| SEQ ID NO: 3144 | VH | E-H.12 | QVQLVQSGAEVKKPGASVKVSCKASGYAFSS |
| | | | SWMNWVRQAPGQGLEWIGRIYPGDGDTKYN |
| | | | GKFKGRATLTADKSISTAYMELSRLRSDDTV |
| | | | VYYCARRGTGGWYFDVWGQGTTVTVSS |
| SEQ ID NO: 3145 | VH | E-H.13 | QVQLVQSGAEVKKPGASVKVSCKASGYAFSS |
| | | | SWMNWVRQAPGQGLEWIGRIYPGDGDTKYN |
| | | | GKFKGWATLTADKSISTAYMELSRLRSDDTA |
| | | | VYYCARRGTGGWYFDVWGQGTTVTVSS |
| SEQ ID NO: 3146 | VH | E-H.14 | QVQLVQSGAEVKKPGASVKVSCKASGYAFSS |
| | | | SWMNWVRQATGQGLEWIGRIYPGDGDTKYN |
| | | | GKFKGRATLTANKSISTAYMELSSLRSEDTAV |
| | | | YYCARRGTGGWYFDVWGQGTTVTVSS |
| SEQ ID NO: 3147 | VH | E-H.15 | QVQLVQSGSELKKPGASVKVSCKASGYAFSS |
| | | | SWMNWVRQAPGQGLEWIGRIYPGDGDTKYN |
| | | | GKFKGRAVLSADKSVSTAYLQISSLKAEDTA |
| | | | VYYCARRGTGGWYFDVWGQGTTVTVSS |
| SEQ ID NO: 3148 | VH | E-H.16 | QVQLVQSGPEVKKPGTSVKVSCKASGYAFSS |
| | | | SWMNWVRQARGQRLEWIGRIYPGDGDTKYN |
| | | | GKFKGRATLTADKSTSTAYMELSSLRSEDTA |
| | | | VYYCARRGTGGWYFDVWGQGTTVTVSS |
| SEQ ID NO: 3149 | VH | E-H.17 | EVQLVQSGAEVKKPGESLKISCKASGYAFSSS |
| | | | WMNWVRQMPGKGLEWIGRIYPGDGDTKYN |
| | | | GKFKGQATLSADKSISTAYLQWSSLKASDTA |
| | | | MYYCARRGTGGWYFDVWGQGTTVTVSS |
| SEQ ID NO: 3150 | VH | E-H.18 | QVQLVQSGSELKKPGASVKVSCKASGYAFSS |
| | | | SWMNWVRQAPGQGLEWIGRIYPGDGDTKYN |
| | | | GKFKGRAVLSADKSVSMAYLQISSLKAEDTA |
| | | | VYYCARRGTGGWYFDVWGQGTTVTVSS |
| SEQ ID NO: 3151 | VH | E-H.19 | QVQLVQSGHEVKQPGASVKVSCKASGYAFSS |
| | | | SWMNWVPQAPGQGLEWIGRIYPGDGDTKYN |
| | | | GKFKGRAVLSADKSASTAYLQISSLKAEDMA |
| | | | MYYCARRGTGGWYFDVWGQGTTVTVSS |
| SEQ ID NO: 3152 | VH | E-H.20 | EVQLVQSGAEVKKPGESLKISCKASGYAFSSS |
| | | | WMNWVRQMPGKGLEWIGRIYPGDGDTKYN |
| | | | GKFKGQATLSADKPISTAYLQWSSLKASDTA |
| | | | MYYCARRGTGGWYFDVWGQGTTVTVSS |
| SEQ ID NO: 3153 | VH | E-H.21 | EVQLVQSGAEVKKPGESLRISCKASGYAFSSS |
| | | | WMNWVRQMPGKGLEWIGRIYPGDGDTKYN |
| | | | GKFKGQATLSADKSISTAYLQWSSLKASDTA |
| | | | MYYCARRGTGGWYFDVWGQGTTVTVSS |
| SEQ ID NO: 3154 | VH | E-H.22 | EVQLVQSGAEVKKPGESLRISCKASGYAFSSS |
| | | | WMNWVRQMPGKGLEWIGRIYPGDGDTKYN |
| | | | GKFKGHATLSADKSISTAYLQWSSLKASDTA |
| | | | MYYCARRGTGGWYFDVWGQGTTVTVSS |
| SEQ ID NO: 3155 | VH | E-H.23 | QVQLVQSGAEVKKTGSSVKVSCKASGYAFSS |
| | | | SWMNWVRQAPRQALEWIGRIYPGDGDTKYN |
| | | | GKFKGRATLTADKSMSTAYMELSSLRSEDTA |
| | | | MYYCARRGTGGWYFDVWGQGTTVTVSS |
| SEQ ID NO: 3156 | VH | E-H.24 | EVQLVESGGGLVQPGRSLRLSCTASGYAFSSS |
| | | | WMNWVRQAPGKGLEWIGRIYPGDGDTKYN |
| | | | GKFKGRATLSADKSKSIAYLQMNSLKTEDTA |
| | | | VYYCARRGTGGWYFDVWGQGTTVTVSS |
| SEQ ID NO: 3157 | VH | E-H.25 | EVQLVESGGGLVQPGPSLRLSCTASGYAFSSS |
| | | | WMNWVRQAPGKGLEWIGRIYPGDGDTKYN |
| | | | GKFKGRATLSADKSKSIAYLQMNSLKTEDTA |
| | | | VYYCARRGTGGWYFDVWGQGTTVTVSS |
| SEQ ID NO: 3158 | VH | E-H.26 | QVQLQESGPGLVKPSQTLSLTCTASGYAFSSS |
| | | | WMNWVRQPPGKGLEWIGRIYPGDGDTKYNG |
| | | | KFKGRATLSADKSKSQASLKLSSVTAADTAV |
| | | | YYCARRGTGGWYFDVWGQGTTVTVSS |
| SEQ ID NO: 3159 | VH | E-H.27 | QVQLQESGPGLVKPSGTLSLTCAASGYAFSSS |
| | | | WMNWVRQPPGKGLEWIGRIYPGDGDTKYNG |
| | | | KFKGRATLSADKSKSQASLKLSSVTAADTAV |
| | | | YYCARRGTGGWYFDVWGQGTTVTVSS |
| SEQ ID NO: 3160 | VH | E-H.28 | EVQLVESGGGLVKPGRSLRLSCTASGYAFSSS |
| | | | WMNWVRQAPGKGLEWIGRIYPGDGDTKYN |
| | | | GKFKGRATLSADKSKSIAYLQMNSLKTEDTA |
| | | | VYYCARRGTGGWYFDVWGQGTTVTVSS |
| SEQ ID NO: 3161 | VH | E-H.29 | EVQLVESGGGLVQPGGSLKLSCAASGYAFSSS |
| | | | WMNWVRQASGKGLEWIGRIYPGDGDTKYN |
| | | | GKFKGRATLSADKSKSTAYLQMNSLKTEDTA |
| | | | VYYCARRGTGGWYFDVWGQGTTVTVSS |
| SEQ ID NO: 3162 | VH | E-H.30 | QVQLQESGPGLVKPSQTLSLTCAASGYAFSSS |
| | | | WMNWVRQPPGKGLEWIGRIYPGDGDTKYNG |
| | | | KFKGRATLSADKSKSQASLKLSSVTAADTAV |
| | | | YYCARRGTGGWYFDVWGQGTTVTVSS |
| SEQ ID NO: 3163 | VH | E-H.31 | EVQLVESGGGLVKPGGSLRLSCAASGYAFSSS |
| | | | WMNWVRQAPGKGLEWIGRIYPGDGDTKYN |
| | | | GKFKGRATLSADKSKSTAYLQMNSLKTEDTA |
| | | | VYYCARRGTGGWYFDVWGQGTTVTVSS |
| SEQ ID NO: 3164 | VH | E-H.32 | EVQLVESGGALVKPGGSLRLSCAASGYAFSSS |
| | | | WMNWVRQAPGKGLEWIGRIYPGDGDTKYN |
| | | | GKFKGRATLSADKSKSTAYLQMNSLKTEDTA |
| | | | VYYCARRGTGGWYFDVWGQGTTVTVSS |
| SEQ ID NO: 3165 | VH | E-H.33 | QVQLQESGPGLVKPSQTLSLTCAAYGYAFSSS |
| | | | WMNWVRQPPGKGLEWIGRIYPGDGDTKYNG |
| | | | KFKGRATLSADKSKSQASLKLSSVTAADTAV |
| | | | YYCARRGTGGWYFDVWGQGTTVTVSS |
| SEQ ID NO: 3166 | VH | E-H.34 | QVQLQESGSGLVKPSQTLSLTCAASGYAFSSS |
| | | | WMNWVRQPPGKGLEWIGRIYPGDGDTKYNG |
| | | | KFKGRATLSADKSKSQASLKLSSVTAADTAV |
| | | | YYCARRGTGGWYFDVWGQGTTVTVSS |
| SEQ ID NO: 3167 | VH | E-H.35 | EVQLVESGGGLVQPGGSLRLSCAASGYAFSSS |
| | | | WMNWVRQAPGKGLEWIGRIYPGDGDTKYN |
| | | | GKFKGRATLSADKSKSSAYLQMNSLKTEDTA |
| | | | VYYCARRGTGGWYFDVWGQGTTVTVSS |
| SEQ ID NO: 3168 | VH | E-H.36 | QVQLQESGPGLVKPSDTLSLTCTASGYAFSSS |
| | | | WMNWVRQPPGKGLEWIGRIYPGDGDTKYNG |
| | | | KFKGRATLSADKSKSQASLKLSSVTAADTAV |
| | | | YYCARRGTGGWYFDVWGQGTTVTVSS |
| SEQ ID NO: 3169 | VH | E-H.37 | QVQLQESGPGLVKPSQTLSLTCTASGYAFSSS |
| | | | WMNWVRQHPGKGLEWIGRIYPGDGDTKYN |
| | | | GKFKGRATLSADKSKSQASLKLSSVTAADTA |
| | | | VYYCARRGTGGWYFDVWGQGTTVTVSS |
| SEQ ID NO: 3170 | VH | E-H.38 | QVQLQESGPGLVKPSQTLSLTCTASGYAFSSS |
| | | | WMNWVRQHPGKGLEWIGRIYPGDGDTKYN |
| | | | GKFKGLATLSADKSKSQASLKLSSVTAADTA |
| | | | VYYCARRGTGGWYFDVWGQGTTVTVSS |
| SEQ ID NO: 3171 | VH | E-H.39 | QVQLVESGGGVVQPGRSLRLSCAASGYAFSS |
| | | | SWMNWVRQAPGKGLEWIGRIYPGDGDTKYN |
| | | | GKFKGRATLSADKSKSTAYLQMSSLRAEDTA |
| | | | VYYCARRGTGGWYFDVWGQGTTVTVSS |
| SEQ ID NO: 3172 | VH | E-H.40 | QVQLVESGGGLVKPGGSLRLSCAASGYAFSS |
| | | | SWMNWVRQAPGKGLEWIGRIYPGDGDTKYN |
| | | | GKFKGRATLSADKAKSSAYLQMNSLRAEDT |
| | | | AVYYCARRGTGGWYFDVWGQGTTVTVSS |
| SEQ ID NO: 3173 | VH | E-H.41 | QVQLVESGGGLVQPGGSLRLSCSASGYAFSSS |
| | | | WMNWVRQAPGKGLEWIGRIYPGDGDTKYN |
| | | | GKFKGRATLSADKSKSTAYLQMNSLRAEDTA |
| | | | VYYCARRGTGGWYFDVWGQGTTVTVSS |
| SEQ ID NO: 3174 | VH | E-H.42 | QVQLLESGGGLVKPGGSLRLSCAASGYAFSSS |
| | | | WMNWVRQAPGKGLEWIGRIYPGDGDTKYN |
| | | | GKFKGRATLSADKAKSSAYLQMNSLRAEDT |
| | | | AVYYCARRGTGGWYFDVWGQGTTVTVSS |
| SEQ ID NO: 3175 | VH | E-H.43 | EVQLVESGGGLVQPGGSLRLSCSASGYAFSSS |
| | | | WMNWVRQAPGKGLEWIGRIYPGDGDTKYN |
| | | | GKFKGRATLSADKSKSTAYLQMSSLRAEDTA |
| | | | VYYCARRGTGGWYFDVWGQGTTVTVSS |
| SEQ ID NO: 3176 | VH | E-H.44 | QVQLQESGPGLVKPSDTLSLTCAASGYAFSSS |
| | | | WMNWVRQPPGKGLEWIGRIYPGDGDTKYNG |
| | | | KFKGRATLSADKSKSQASLKLSSVTAVDTAV |
| | | | YYCARRGTGGWYFDVWGQGTTVTVSS |
| SEQ ID NO: 3177 | VH | E-H.45 | QVQLQESGPGLVKPSQTLSLTCAASGYAFSSS |
| | | | WMNWVRQPPGKGLEWIGRIYPGDGDTKYNG |
| | | | KFKGRATLSADKSKSQASLKLSSVTAVDTAV |
| | | | YYCARRGTGGWYFDVWGQGTTVTVSS |
| SEQ ID NO: 3178 | VH | E-H.46 | EVQLVESGGGLVQPGGSLRLSCSASGYAFSSS |
| | | | WMNWVRQAPGKGLEWIGRIYPGDGDTKYN |
| | | | GKFKGRATLSADKSKSTAYVQMSSLRAEDTA |
| | | | VYYCARRGTGGWYFDVWGQGTTVTVSS |
| SEQ ID NO: 3179 | VH | E-H.47 | QVQLVDSGGGVVQPGRSLRLSCAASGYAFSS |
| | | | SWMNWVRQAPGKGLEWIGRIYPGDGDTKYN |
| | | | GKFKGRATLSADKSKSTAYLQMNSLRAEDTA |
| | | | VYYCARRGTGGWYFDVWGQGTTVTVSS |
| SEQ ID NO: 3180 | VH | E-H.48 | QVQLVESGGGVVQPGRSLRLSCAASGYAFSS |
| | | | SWMNWVRQAPGKGLEWIGRIYPGDGDTKYN |
| | | | GKFKGRATLSADKSKSTAYLQMNSLRAEGTA |
| | | | VYYCARRGTGGWYFDVWGQGTTVTVSS |
| SEQ ID NO: 3181 | VH | E-H.49 | QVQLVESGGGVVQPGRSLRLSCAASGYAFSS |
| | | | SWMNWVRQAPGKGLEWIGRIYPGDGDTKYN |
| | | | GKFKGRATLSADKSKSTAYLQMNSLRAEDTA |
| | | | VYYCARRGTGGWYFDVWGQGTTVTVSS |
| SEQ ID NO: 3182 | VH | E-H.50 | EVQLVESGGGLVQPGGSLRLSCAASGYAFSSS |
| | | | WMNWVRQAPGKGLEWIGRIYPGDGDTKYN |
| | | | GKFKGRATLSADKSKSTAYLQMNSLRAEDTA |
| | | | VYYCARRGTGGWYFDVWGQGTTVTVSS |

[0651] In some embodiments, the anti-TCRβ V5 antibody molecule comprises a VH and/or a VL of an antibody described in Table 33, or a sequence with at least 80%, 85%, 90%, 95%, 96%, 97%, 98%, 99% or more identity thereto.

[0652] In some embodiments, the anti-TCRβ V5 antibody molecule comprises a VH and a VL of an antibody described in Table 33, or a sequence with at least 80%, 85%, 90%, 95%, 96%, 97%, 98%, 99% or more identity thereto.

[0653] In some embodiments, the anti-TCRβ V5 antibody molecule comprises a VH and/or a VL of an antibody described in Table 11, or a sequence with at least 80%, 85%, 90%, 95%, 96%, 97%, 98%, 99% or more identity thereto.

[0654] In some embodiments, the anti-TCRβ V5 antibody molecule comprises a VH and a VL of an antibody described in Table 11, or a sequence with at least 80%, 85%, 90%, 95%, 96%, 97%, 98%, 99% or more identity thereto.

### Anti-TCRβ V10 Antibodies

[0655] Accordingly, in one aspect, the disclosure provides an anti-TCRβV antibody molecule that binds to a human TCRβ V10 subfamily member. In some embodiments, TCRβ V10 subfamily is also known as TCRβ V12. In some embodiments, the TCRβ V10 subfamily comprises: TCRβ V10-1*01, TCRβ V10-1*02, TCRβ V10-3*01 or TCRβ V10-2*01, or a variant thereof.

[0656] Exemplary anti-TCRβ V10 antibodies of the disclosure are provided in Table 12. In some embodiments, the anti-TCRβ V10 is antibody D, e.g., humanized antibody D (antibody D-H), as provided in Table 12. In some embodiments, antibody D comprises one or more (e.g., three) light chain CDRs and/or one or more (e.g., three) heavy chain CDRs provided in Table 12, or a sequence with at least 95% identity thereto. In some embodiments, antibody D comprises a variable heavy chain (VH) and/or a variable light chain (VL) provided in Table 12, or a sequence with at least 95% identity thereto.

TABLE 12
Amino acid sequences for anti TCRβ V10 antibodies
Amino acid and nucleotide sequences for murine and humanized antibody molecules which bind to
TCRBV 10 (e.g., TCRBV 10-1, TCRBV 10-2 or TCRBV 10-3). The amino acid the heavy and light
chain CDRs, and the amino acid and nucleotide sequences of the heavy and light chain variable regions,
and the heavy and light chains are shown.
Murine antibody D, also referred to as S511 antibody

| | | |
|---|---|---|
| SEQ ID NO: 1288 | HC CDR1 (Kabat) | SYGMS |
| SEQ ID NO: 1289 | HC CDR2 (Kabat) | LISSGGSYTYYTDSVKG |
| SEQ ID NO: 1290 | HC CDR3 (Kabat) | HGGNFFDY |
| SEQ ID NO: 1291 | HC CDR1 (Chothia) | GFTFRSY |
| SEQ ID NO: 1292 | HC CDR2 (Chothia) | SSGGSY |
| SEQ ID NO: 1290 | HC CDR3 (Chothia) | HGGNFFDY |
| SEQ ID NO: 1293 | HC CDR1 (Combined) | GFTFRSYGMS |
| SEQ ID NO: 1289 | HC CDR2 (Combined)) | LISSGGSYTYYTDSVKG |
| SEQ ID NO: 1290 | HC CDR3(Combined) | HGGNFFDY |
| SEQ ID NO: 1294 | LC CDR1 (Kabat) | SVSSSVSYMH |
| SEQ ID NO: 1295 | LC CDR2 (Kabat) | DTSKLAS |
| SEQ ID NO: 1296 | LC CDR3 (Kabat) | QQWSSNPQYT |
| SEQ ID NO: 1297 | LC CDR1 (Chothia) | SSSVSY |
| SEQ ID NO: 1295 | LC CDR2 (Chothia) | DTSKLAS |
| SEQ ID NO: 1296 | LC CDR3 (Chothia) | QQWSSNPQYT |
| SEQ ID NO: 1294 | LC CDR1 (Combined) | SVSSSVSYMH |
| SEQ ID NO: 1295 | LC CDR2 (Combined) | DTSKLAS |
| SEQ ID NO: 1296 | LC CDR3 (Combined) | QQWSSNPQYT |
| SEQ ID NO: 3183 | VH | EVQLVESGGDLVKPGGSLKLSCAVSGFTFRSY |
| | | GMSWVRQTPDKRLEWVALISSGGSYTYYTDS |
| | | VKGRFTISRDNAKNTLYLQMSSLKSEDTAIYY |
| | | CSRHGGNFFDYWGQGTTLTVSS |
| SEQ ID NO: 3184 | VL | QIVLTQSPSIMSASPGEKVTMTCSVSSSVSYM |
| | | HWYQQKSGTSPKRWIYDTSKLASGVPARFSG |
| | | SGSGTSYSLTISSMEAEDAATYYCQQWSSNPQ |
| | | YTFGGGTKLEIK |

Humanized antibody D (D-H antibody)
Variable light chain (VL)

| | | | |
|---|---|---|---|
| SEQ ID NO: 3185 | VL | D-VL- | DIVLTQSPAFLSVTPGEKVTITCSVSSSVSYMHWYQQK |
| | | H.1 | PDQAPKLLIYDTSKLASGVPSRFSGSGSGTDYTFTISSL |
| | | | EAEDAATYYCQQWSSNPQYTFGQGTKLEIK |
| SEQ ID NO: 3186 | VL | D-VL- | AIQLTQSPSSLSASVGDRVTITCSVSSSVSYMHWYQQK |
| | | H.2 | PGKAPKLLIYDTSKLASGVPSRFSGSGSGTDYTLTISSL |
| | | | QPEDFATYYCQQWSSNPQYTFGQGTKLEIK |
| SEQ ID NO: 3187 | VL | D-VL- | DIQLTQSPSFLSASVGDRVTITCSVSSSVSYMHWYQQK |
| | | H.3 | PGKAPKLLIYDTSKLASGVPSRFSGSGSGTEYTLTISSL |
| | | | QPEDFATYYCQQWSSNPQYTFGQGTKLEIK |
| SEQ ID NO: 3188 | VL | D-VL- | DIQLTQSPSSLSASVGDRVTITCSVSSSVSYMHWYQQK |
| | | H.4 | PGKAPKLLIYDTSKLASGVPSRFSGSGSGTDYTLTISSL |
| | | | QPEDFATYYCQQWSSNPQYTFGQGTKLEIK |
| SEQ ID NO: 3189 | VL | D-VL- | DIQLTQSPSSVSASVGDRVTITCSVSSSVSYMHWYQQ |
| | | H.5 | KPGKAPKLLIYDTSKLASGVPSRFSGSGSGTDYTLTISS |
| | | | LQPEDFATYYCQQWSSNPQYTFGQGTKLEIK |
| SEQ ID NO: 3190 | VL | D- VL- | DIQLTQSPSSLSASVGDRVTITCSVSSSVSYMHWYQQK |
| | | H.6 | PGKVPKLLIYDTSKLASGVPSRFSGSGSGTDYTLTISSL |
| | | | QPEDVATYYCQQWSSNPQYTFGQGTKLEIK |
| SEQ ID NO: 3191 | VL | D- VL- | DIQLTQSPSSLSASVGDRVTITCSVSSSVSYMHWYQQK |
| | | H.7 | PGQAPKLLIYDTSKLASGVPSRFSGSGSGTDYTLTISSL |
| | | | QPEDVATYYCQQWSSNPQYTFGQGTKLEIK |
| SEQ ID NO: 3192 | VL | D- VL- | EIVLTQSPDFQSVTPKEKVTITCSVSSSVSYMHWYQQK |
| | | H.8 | PDQSPKLLIYDTSKLASGVPSRFSGSGSGTDYTLTINSL |
| | | | EAEDAATYYCQQWSSNPQYTFGQGTKLEIK |
| SEQ ID NO: 3193 | VL | D- VL- | AIRLTQSPFSLSASVGDRVTITCSVSSSVSYMHWYQQK |
| | | H.9 | PAKAPKLFIYDTSKLASGVPSRFSGSGSGTDYTLTISSL |
| | | | QPEDFATYYCQQWSSNPQYTFGQGTKLEIK |
| SEQ ID NO: 3194 | VL | D- VL- | DIQLTQSPSSLSASVGDRVTITCSVSSSVSYMHWYQQK |
| | | H.10 | PGKAPKLLIYDTSKLASGVPSRFSGSGSGTDYTFTISSL |
| | | | QPEDIATYYCQQWSSNPQYTFGQGTKLEIK |
| SEQ ID NO: 3195 | VL | D- VL- | EIVLTQSPATLSLSPGERATLSCSVSSSVSYMHWYQQK |
| | | H.11 | PGQAPKLLIYDTSKLASGIPARFSGSGSGTDYTLTISSL |
| | | | EPEDFAVYYCQQWSSNPQYTFGQGTKLEIK |
| SEQ ID NO: 3196 | VL | D- VL- | DIQLTQSPSTLSASVGDRVTITCSVSSSVSYMHWYQQ |
| | | H.12 | KPGKAPKLLIYDTSKLASGVPSRFSGSGSGTEYTLTISS |
| | | | LQPDDFATYYCQQWSSNPQYTFGQGTKLEIK |
| SEQ ID NO: 3197 | VL | D- VL- | DIQLTQSPSSLSASVGDRVTITCSVSSSVSYMHWYQQK |
| | | H.13 | PGKTPKLLIYDTSKLASGIPSRFSGSGSGTDYTLTIRSL |
| | | | QPEDFATYYCQQWSSNPQYTFGQGTKLEIK |
| SEQ ID NO: 3198 | VL | D- VL- | EIVLTQSPPTLSLSPGERVTLSCSVSSSVSYMHWYQQK |
| | | H.14 | PGQAPKLLIYDTSKLASGIPARFSGSGSGTDYTLTISSL |
| | | | QPEDFAVYYCQQWSSNPQYTFGQGTKLEIK |
| SEQ ID NO: 3199 | VL | D- VL- | DIQLTQSPSSLSASVGDRVTITCSVSSSVSYMHWYQQK |
| | | H.15 | PGKAPKRLIYDTSKLASGVPSRFSGSGSGTEYTLTISSL |
| | | | QPEDFATYYCQQWSSNPQYTFGQGTKLEIK |
| SEQ ID NO: 3200 | VL | D- VL- | EIVLTQSPATLSLSPGERATLSCSVSSSVSYMHWYQQK |
| | | H.16 | PGQAPKLLIYDTSKLASGIPARFSGSGPGTDYTLTISSL |
| | | | EPEDFAVYYCQQWSSNPQYTFGQGTKLEIK |
| SEQ ID NO: 3201 | VL | D- VL- | EIVLTQSPATLSLSPGERATLSCSVSSSVSYMHWYQQK |
| | | H.17 | PGQAPKLLIYDTSKLASGIPARFSGSGSGTDYTLTISRL |
| | | | EPEDFAVYYCQQWSSNPQYTFGQGTKLEIK |
| SEQ ID NO: 3202 | VL | D- VL- | EIVLTQSPATLSLSPGERATLSCSVSSSVSYMHWYQQK |
| | | H.18 | PGQAPKLLIYDTSKLASGIPARFSGSGSGTDYTLTISSL |
| | | | QPEDFAVYYCQQWSSNPQYTFGQGTKLEIK |
| SEQ ID NO: 3203 | VL | D- VL- | EIVLTQSPATLSVSPGERATLSCSVSSSVSYMHWYQQ |
| | | H.19 | KPGQAPKLLIYDTSKLASGIPARFSGSGSGTEYTLTISS |
| | | | LQSEDFAVYYCQQWSSNPQYTFGQGTKLEIK |
| SEQ ID NO: 3204 | VL | D- VL- | EIVLTQSPATLSVSPGERATLSCSVSSSVSYMHWYQQ |
| | | H.20 | KPGQAPKLLIYDTSKLASGIPARFSGSGSGTEYTLTISIL |
| | | | QSEDFAVYYCQQWSSNPQYTFGQGTKLEIK |
| SEQ ID NO: 3205 | VL | D- VL- | EIVLTQSPPTLSLSPGERVTLSCSVSSSVSYMHWYQQK |
| | | H.21 | PGQAPKLLIYDTSKLASSIPARFSGSGSGTDYTLTISSL |
| | | | QPEDFAVYYCQQWSSNPQYTFGQGTKLEIK |
| SEQ ID NO: 3206 | VL | D- VL- | DIQLTQSPSSLSASVGDRVTITCSVSSSVSYMHWYQQK |
| | | H.22 | PGKAPKSLIYDTSKLASGVPSRFSGSGSGTDYTLTISSL |
| | | | QPEDFATYYCQQWSSNPQYTFGQGTKLEIK |
| SEQ ID NO: 3207 | VL | D- VL- | DIQLTQSPSSLSASVGDRVTITCSVSSSVSYMHWYQQK |
| | | H.23 | PGKAPKRLIYDTSKLASGVPSRFSGSGSGTEYTLTISNL |
| | | | QPEDFATYYCQQWSSNPQYTFGQGTKLEIK |
| SEQ ID NO: 3208 | VL | D- VL- | DIQLTQSPSAMSASVGDRVTITCSVSSSVSYMHWYQQ |
| | | H.24 | KPGKVPKRLIYDTSKLASGVPSRFSGSGSGTEYTLTISS |
| | | | LQPEDFATYYCQQWSSNPQYTFGQGTKLEIK |
| SEQ ID NO: 3209 | VL | D- VL- | EIVLTQSPATLSLSPGERATLSCSVSSSVSYMHWYQQK |
| | | H.25 | PGQAPKLLIYDTSKLASGIPDRFSGSGSGTDYTLTISRL |
| | | | EPEDFAVYYCQQWSSNPQYTFGQGTKLEIK |
| SEQ ID NO: 3210 | VL | D- VL- | EIVLTQSPATLSLSPGERATLSCSVSSSVSYMHWYQQK |
| | | H.26 | PGLAPKLLIYDTSKLASGIPDRFSGSGSGTDYTLTISRL |
| | | | EPEDFAVYYCQQWSSNPQYTFGQGTKLEIK |
| SEQ ID NO: 3211 | VL | D- VL- | EIVLTQSPGTLSLSPGERATLSCSVSSSVSYMHWYQQK |
| | | H.27 | PGQAPKLLIYDTSKLASGIPDRFSGSGSGTDYTLTISRL |
| | | | EPEDFAVYYCQQWSSNPQYTFGQGTKLEIK |
| SEQ ID NO: 3212 | VL | D- VL- | DIQLTQSPSSLSASVGDRVTITCSVSSSVSYMHWYQQK |
| | | H.28 | PGKAPKSLIYDTSKLASGVPSKFSGSGSGTDYTLTISSL |
| | | | QPEDFATYYCQQWSSNPQYTFGQGTKLEIK |
| SEQ ID NO: 3213 | VL | D- VL- | DIQLTQSPSSLSASVGDRVTITCSVSSSVSYMHWYQQK |
| | | H.29 | PEKAPKSLIYDTSKLASGVPSRFSGSGSGTDYTLTISSL |
| | | | QPEDFATYYCQQWSSNPQYTFGQGTKLEIK |
| SEQ ID NO: 3214 | VL | D- VL- | DIVLTQSPDSLAVSLGERATINCSVSSSVSYMHWYQQ |
| | | H.30 | KPGQPPKLLIYDTSKLASGVPDRFSGSGSGTDYTLTISS |
| | | | LQAEDVAVYYCQQWSSNPQYTFGQGTKLEIK |
| SEQ ID NO: 3215 | VL | D- VL- | EIVLTQTPLSLSITPGEQASMSCSVSSSVSYMHWYLQK |
| | | H.31 | ARPVPKLLIYDTSKLASGVPDRFSGSGSGTDYTLKISR |
| | | | VEAEDFGVYYCQQWSSNPQYTFGQGTKLEIK |
| SEQ ID NO: 3216 | VL | D- VL- | EIVLTQTPLSLSITPGEQASISCSVSSSVSYMHWYLQKA |
| | | H.32 | RPVPKLLIYDTSKLASGVPDRFSGSGSGTDYTLKISRV |
| | | | EAEDFGVYYCQQWSSNPQYTFGQGTKLEIK |
| SEQ ID NO: 3217 | VL | D- VL- | DIVLTQSPLSLPVTPGEPASISCSVSSSVSYMHWYLQK |
| | | H.33 | PGQSPKLLIYDTSKLASGVPDRFSGSGSGTDYTLKISR |
| | | | VEAEDVGVYYCQQWSSNPQYTFGQGTKLEIK |
| SEQ ID NO: 3218 | VL | D- VL- | DIVLTQSPLSLPVTLGQPASISCSVSSSVSYMHWYQQR |
| | | H.34 | PGQSPKRLIYDTSKLASGVPDRFSGSGSGTDYTLKISR |
| | | | VEAEDVGVYYCQQWSSNPQYTFGQGTKLEIK |
| SEQ ID NO: 3219 | VL | D- VL- | DIVLTQTPLSLPVTPGEPASISCSVSSSVSYMHWYLQK |
| | | H.35 | PGQSPKLLIYDTSKLASGVPDRFSGSGSGTDYTLKISR |
| | | | VEAEDVGVYYCQQWSSNPQYTFGQGTKLEIK |
| SEQ ID NO: 3220 | VL | D- VL- | DIVLTQTPLSLSVTPGQPASISCSVSSSVSYMHWYLQK |
| | | H.36 | PGQSPKLLIYDTSKLASGVPDRFSGSGSGTDYTLKISR |
| | | | VEAEDVGVYYCQQWSSNPQYTFGQGTKLEIK |
| SEQ ID NO: 3221 | VL | D- VL- | DIVLTQTPLSLSVTPGQPASISCSVSSSVSYMHWYLQK |
| | | H.37 | PGQPPKLLIYDTSKLASGVPDRFSGSGSGTDYTLKISR |
| | | | VEAEDVGVYYCQQWSSNPQYTFGQGTKLEIK |
| SEQ ID NO: 3222 | VL | D- VL- | DIQLIQSPSFLSASVGDRVSIICSVSSSVSYMHWYLQKP |
| | | H.38 | GKSPKLFIYDTSKLASGVSSRFSGRGSGTDYTLTIISLK |
| | | | PEDFAAYYCQQWSSNPQYTFGQGTKLEIK |
| SEQ ID NO: 3223 | VL | D- VL- | DIVLTQTPLSSPVTLGQPASISCSVSSSVSYMHWYQQR |
| | | H.39 | PGQPPKLLIYDTSKLASGVPDRFSGSGAGTDYTLKISR |
| | | | VEAEDVGVYYCQQWSSNPQYTFGQGTKLEIK |
| SEQ ID NO: 3224 | VL | D- VL- | EITLTQSPAFMSATPGDKVNISCSVSSSVSYMHWYQQ |
| | | H.40 | KPGEAPKFIIYDTSKLASGIPPRFSGSGYGTDYTLTINNI |
| | | | ESEDAAYYYCQQWSSNPQYTFGQGTKLEIK |

Variable HEAVY chain (VH)

| | | | |
|---|---|---|---|
| SEQ ID NO: 3225 | VH | D-VH- | EVQLVESGGGLVKPGGSLRLSCAVSGFTFRSYGMSW |
| | | H.1 | VRQAPGKGLEWVALISSGGSYTYYTDSVKGRFTISRD |
| | | | NSKNTLYLQMNSLKTEDTAVYYCSRHGGNFFDYWG |
| | | | QGTTVTVSS |
| SEQ ID NO: 3226 | VH | D- VH- | EVQLVESGGALVKPGGSLRLSCAVSGFTFRSYGMSW |
| | | H.2 | VRQAPGKGLEWVALISSGGSYTYYTDSVKGRFTISRD |
| | | | NSKNTLYLQMNSLKTEDTAVYYCSRHGGNFFDYWG |
| | | | QGTTVTVSS |
| SEQ ID NO: 3227 | VH | D- VH- | EVQLVESGGGLVQPGGSLRLSCAVSGFTFRSYGMSW |
| | | H.3 | VRQAPGKGLEWVALISSGGSYTYYTDSVKGRFTISRD |
| | | | NAKNTLYLQMNSLRAEDTAVYYCSRHGGNFFDYWG |
| | | | QGTTVTVSS |
| SEQ ID NO: 3228 | VH | D- VH- | EVQLVESGGGLVQPGGSLRLSCAVSGFTFRSYGMSW |
| | | H.4 | VRQAPGKGLEWVALISSGGSYTYYTDSVKGRFTISRD |
| | | | NAKNSLYLQMNSLRAEDTAVYYCSRHGGNFFDYWG |
| | | | QGTTVTVSS |
| SEQ ID NO: 3229 | VH | D- VH- | EVQLVESGGGLVQPGGSLRLSCAVSGFTFRSYGMSW |
| | | H.5 | VRQAPGKGLEWVALISSGGSYTYYTDSVKGRFTISRD |
| | | | NSKNSLYLQMNSLKTEDTAVYYCSRHGGNFFDYWG |
| | | | QGTTVTVSS |
| SEQ ID NO: 3230 | VH | D- VH- | EVQLVESGGGLVQPGGSLRLSCAVSGFTFRSYGMSW |
| | | H.6 | VRQAPGKGLEWVALISSGGSYTYYTDSVKGRFTISRD |
| | | | NAKNSLYLQMNSLRAEDMAVYYCSRHGGNFFDYWG |
| | | | QGTTVTVSS |
| SEQ ID NO: 3231 | VH | D- VH- | EVQLVESGGGLVQPGGSLRLSCAVSGFTFRSYGMSW |
| | | H.7 | VRQAPGKGLEWVALISSGGSYTYYTDSVKGQFTISRD |
| | | | NAKNTLYLQMNSLRAEDMAVYYCSRHGGNFFDYWG |
| | | | QGTTVTVSS |
| SEQ ID NO: 3232 | VH | D- VH- | EVQLVESGGGLVKPGRSLRLSCTVSGFTFRSYGMSWV |
| | | H.8 | RQAPGKGLEWVALISSGGSYTYYTDSVKGRFTISRDN |
| | | | SKNILYLQMNSLKTEDTAVYYCSRHGGNFFDYWGQG |
| | | | TTVTVSS |
| SEQ ID NO: 3233 | VH | D- VH- | EVQLVESGGGLVKPGGSLRLSCAVSGFTFRSYGMSW |
| | | H.9 | VRQAPGKGLEWVALISSGGSYTYYTDSVKGRFTISRD |
| | | | NAKNSLYLQMNSLRAEDTAVYYCSRHGGNFFDYWG |
| | | | QGTTVTVSS |
| SEQ ID NO: 3234 | VH | D- VH- | EVQLVESGGGLVQPGGSLKLSCAVSGFTFRSYGMSW |
| | | H.10 | VRQASGKGLEWVALISSGGSYTYYTDSVKGRFTISRD |
| | | | NSKNTLYLQMNSLKTEDTAVYYCSRHGGNFFDYWG |
| | | | QGTTVTVSS |
| SEQ ID NO: 3235 | VH | D- VH- | QVQLVESGGGVVQPGGSLRLSCAVSGFTFRSYGMSW |
| | | H.11 | VRQAPGKGLEWVALISSGGSYTYYTDSVKGRFTISRD |
| | | | NSKNTLYLQMNSLRAEDTAVYYCSRHGGNFFDYWG |
| | | | QGTTVTVSS |
| SEQ ID NO: 3236 | VH | D- VH- | QVQLVESGGGVVQPGRSLRLSCAVSGFTFRSYGMSW |
| | | H.12 | VRQAPGKGLEWVALISSGGSYTYYTDSVKGRFTISRD |
| | | | NSKNTLYLQMSSLRAEDTAVYYCSRHGGNFFDYWGQ |
| | | | GTTVTVSS |
| SEQ ID NO: 3237 | VH | D- VH- | EVQLVESGGGLVQPGGSLRLSCPVSGFTFRSYGMSWV |
| | | H.13 | RQAPGKGLEWVALISSGGSYTYYTDSVKGRFTISRDN |
| | | | ANNSLYLQMNSLRAEDTAVYYCSRHGGNFFDYWGQ |
| | | | GTTVTVSS |
| SEQ ID NO: 3238 | VH | D- VH- | EVQLVESGGGLVQPGRSLRLSCTVSGFTFRSYGMSWV |
| | | H.14 | RQAPGKGLEWVALISSGGSYTYYTDSVKGRFTISRDN |
| | | | SKNILYLQMNSLKTEDTAVYYCSRHGGNFFDYWGQG |
| | | | TTVTVSS |
| SEQ ID NO: 3239 | VH | D- VH- | EVQLVESGGGLVQPGPSLRLSCTVSGFTFRSYGMSWV |
| | | H.15 | RQAPGKGLEWVALISSGGSYTYYTDSVKGRFTISRDN |
| | | | SKNILYLQMNSLKTEDTAVYYCSRHGGNFFDYWGQG |
| | | | TTVTVSS |
| SEQ ID NO: 3240 | VH | D- VH- | EVQLVESGGGLVQPGGSLRLSCAVSGFTFRSYGMSW |
| | | H.16 | VRQAPGKGLEWVALISSGGSYTYYTDSVKGRFTISRD |
| | | | NSKNTLYLQMNSLRAEDTAVYYCSRHGGNFFDYWG |
| | | | QGTTVTVSS |
| SEQ ID NO: 3241 | VH | D- VH- | EVQLVESGGGLVQPGGSLRLSCAVSGFTFRSYGMSW |
| | | H.17 | VRQAPGKGLEWVALISSGGSYTYYTDSVKGRFTISRD |
| | | | NAKNSLYLQMNSLRDEDTAVYYCSRHGGNFFDYWG |
| | | | QGTTVTVSS |
| SEQ ID NO: 3242 | VH | D- VH- | QVQLVESGGGLVKPGGSLRLSCAVSGFTFRSYGMSW |
| | | H.18 | VRQAPGKGLEWVALISSGGSYTYYTDSVKGRFTISRD |
| | | | NAKNSLYLQMNSLRAEDTAVYYCSRHGGNFFDYWG |
| | | | QGTTVTVSS |
| SEQ ID NO: 3243 | VH | D- VH- | QVQLVESGGGVVQPGRSLRLSCAVSGFTFRSYGMSW |
| | | H.19 | VRQAPGKGLEWVALISSGGSYTYYTDSVKGRFTISRD |
| | | | NSKNTLYLQMNSLRAEDTAVYYCSRHGGNFFDYWG |
| | | | QGTTVTVSS |
| SEQ ID NO: 3244 | VH | D- VH- | EVQLLESGGGLVQPGGSLRLSCAVSGFTFRSYGMSWV |
| | | H.20 | RQAPGKGLEWVALISSGGSYTYYTDSVKGRFTISRDN |
| | | | SKNTLYLQMNSLRAEDTAVYYCSRHGGNFFDYWGQ |
| | | | GTTVTVSS |
| SEQ ID NO: 3245 | VH | D- VH- | EVQLVESGGGLVQPGGSLRLSCAVSGFTFRSYGMSW |
| | | H.21 | VRQAPGKGLEWVALISSGGSYTYYTDSVKGRFTISRH |
| | | | NSKNTLYLQMNSLRAEDTAVYYCSRHGGNFFDYWG |
| | | | QGTTVTVSS |
| SEQ ID NO: 3246 | VH | D- VH- | EVQLVESGGGLIQPGGSLRLSCAVSGFTFRSYGMSWV |
| | | H.22 | RQPPGKGLEWVALISSGGSYTYYTDSVKGRFTISRDNS |
| | | | KNTLYLQMNSLRAEDTAVYYCSRHGGNFFDYWGQG |
| | | | TTVTVSS |
| SEQ ID NO: 3247 | VH | D- VH- | EVQLVESGGGLIQPGGSLRLSCAVSGFTFRSYGMSWV |
| | | H.23 | RQAPGKGLEWVALISSGGSYTYYTDSVKGRFTISRDN |
| | | | SKNTLYLQMNSLRAEDTAVYYCSRHGGNFFDYWGQ |
| | | | GTTVTVSS |
| SEQ ID NO: 3248 | VH | D- VH- | EVQLVESGGGLVQPGRSLRLSCAVSGFTFRSYGMSW |
| | | H.24 | VRQAPGKGLEWVALISSGGSYTYYTDSVKGRFTISRD |
| | | | NAKNSLYLQMNSLRAEDTALYYCSRHGGNFFDYWG |
| | | | QGTTVTVSS |
| SEQ ID NO: 3249 | VH | D- VH- | QVQLVESGGGVVQPGRSLRLSCAVSGFTFRSYGMSW |
| | | H.25 | VRQAPGKGLEWVALISSGGSYTYYTDSVKGRFTISRD |
| | | | NSKNRLYLQMNSLRAEDTAVYYCSRHGGNFFDYWG |
| | | | QGTTVTVSS |
| SEQ ID NO: 3250 | VH | D- VH- | QVQLVESGGGVVQPGRSLRLSCAVSGFTFRSYGMSW |
| | | H.26 | VRQAPGKGLEWVALISSGGSYTYYTDSVKGRFTISRD |
| | | | NSKNTLYLQMNSLRAEGTAVYYCSRHGGNFFDYWG |
| | | | QGTTVTVSS |
| SEQ ID NO: 3251 | VH | D- VH- | QVQLVESGGGVVQPGRSLRLSCAVSGFTFRSYGMSW |
| | | H.27 | VRQAPGKGLEWVALISSGGSYTYYTDSVKGRFAISRD |
| | | | NSKNTLYLQMNSLRAEDTAVYYCSRHGGNFFDYWG |
| | | | QGTTVTVSS |
| SEQ ID NO: 3252 | VH | D- VH- | QVQLVDSGGGVVQPGRSLRLSCAVSGFTFRSYGMSW |
| | | H.28 | VRQAPGKGLEWVALISSGGSYTYYTDSVKGRFTISRD |
| | | | NSKNTLYLQMNSLRAEDTAVYYCSRHGGNFFDYWG |
| | | | QGTTVTVSS |
| SEQ ID NO: 3253 | VH | D- VH- | EVQLVESGGGVVRPGGSLRLSCAVSGFTFRSYGMSW |
| | | H.29 | VRQAPGKGLEWVALISSGGSYTYYTDSVKGRFTISRD |
| | | | NAKNSLYLQMNSLRAEDTALYHCSRHGGNFFDYWG |
| | | | QGTTVTVSS |
| SEQ ID NO: 3254 | VH | D- VH- | EVQLVESGGVVVQPGGSLRLSCAVSGFTFRSYGMSW |
| | | H.30 | VRQAPGKGLEWVALISSGGSYTYYTDSVKGRFTISRD |
| | | | NSKNSLYLQMNSLRAEDTALYYCSRHGGNFFDYWGQ |
| | | | GTTVTVSS |
| SEQ ID NO: 3255 | VH | D- VH- | EVQLVESGGGVVQPGGSLRLSCAVSGFTFRSYGMSW |
| | | H.31 | VRQAPGKGLEWVALISSGGSYTYYTDSVKGRFTISRD |
| | | | NSKNSLYLQMNSLRTEDTALYYCSRHGGNFFDYWGQ |
| | | | GTTVTVSS |
| SEQ ID NO: 3256 | VH | D- VH- | EVQLVESGGVVVQPGGSLRLSCAVSGFTFRSYGMSW |
| | | H.32 | VRQAPGKGLEWVALISSGGSYTYYTDSVKGRFTISRD |
| | | | NSKNSLYLQMNSLRTEDTALYYCSRHGGNFFDYWGQ |
| | | | GTTVTVSS |
| SEQ ID NO: 3257 | VH | D- VH- | EVQLVETGGGLIQPGGSLRLSCAVSGFTFRSYGMSWV |
| | | H.33 | RQAPGKGLEWVALISSGGSYTYYTDSVKGRFTISRDN |
| | | | SKNTLYLQMNSLRAEDTAVYYCSRHGGNFFDYWGQ |
| | | | GTTVTVSS |
| SEQ ID NO: 3258 | VH | D- VH- | EVQLVESGGGLVQPGGSLRLSCAVSGFTFRSYGMSW |
| | | H.34 | VRQATGKGLEWVALISSGGSYTYYTDSVKGRFTISRE |
| | | | NAKNSLYLQMNSLRAGDTAVYYCSRHGGNFFDYWG |
| | | | QGTTVTVSS |
| SEQ ID NO: 3259 | VH | D- VH- | EVQLVESRGVLVQPGGSLRLSCAVSGFTFRSYGMSW |
| | | H.35 | VRQAPGKGLEWVALISSGGSYTYYTDSVKGRFTISRD |
| | | | NSKNTLHLQMNSLRAEDTAVYYCSRHGGNFFDYWG |
| | | | QGTTVTVSS |
| SEQ ID NO: 3260 | VH | D- VH- | EVQLVESGGGLVQPGRSLRLSCAVSGFTFRSYGMSW |
| | | H.36 | VRQAPGKGLEWVALISSGGSYTYYTDSVKGRFTISRD |
| | | | NAKNSLYLQMNSLRAEDMALYYCSRHGGNFFDYWG |
| | | | QGTTVTVSS |
| SEQ ID NO: 3261 | VH | D- VH- | QVQLVESGGGLVQPGGSLRLSCSVSGFTFRSYGMSW |
| | | H.37 | VRQAPGKGLEWVALISSGGSYTYYTDSVKGRFTISRD |
| | | | NSKNTLYLQMNSLRAEDTAVYYCSRHGGNFFDYWG |
| | | | QGTTVTVSS |
| SEQ ID NO: 3262 | VH | D- VH- | EVQLVESGGGLVQPGGSLRLSCSVSGFTFRSYGMSWV |
| | | H.38 | RQAPGKGLEWVALISSGGSYTYYTDSVKGRFTISRDN |
| | | | SKNTLYLQMSSLRAEDTAVYYCSRHGGNFFDYWGQG |
| | | | TTVTVSS |
| SEQ ID NO: 3263 | VH | D- VH- | QVQLVESGGGVVQPGRSLRLSCAVSGFTFRSYGMSW |
| | | H.39 | VRQAPGKGLEWVALISSGGSYTYYTDSVKGRFTISRD |
| | | | NSTNTLFLQMNSLRAEDTAVYYCSRHGGNFFDYWGQ |
| | | | GTTVTVSS |
| SEQ ID NO: 3264 | VH | D- VH- | QVQLLESGGGLVKPGGSLRLSCAVSGFTFRSYGMSW |
| | | H.40 | VRQAPGKGLEWVALISSGGSYTYYTDSVKGRFTISRD |
| | | | NAKNSLYLQMNSLRAEDTAVYYCSRHGGNFFDYWG |
| | | | QGTTVTVSS |
| SEQ ID NO: 3265 | VH | D- VH- | EVQLVESGEGLVQPGGSLRLSCAVSGFTFRSYGMSWV |
| | | H.41 | RQAPGKGLEWVALISSGGSYTYYTDSVKGRFTISRDN |
| | | | SKNTLYLQMGSLRAEDMAVYYCSRHGGNFFDYWGQ |
| | | | GTTVTVSS |
| SEQ ID NO: 3266 | VH | D- VH- | EVQLVESGGGLVQPGGSLRLSCAVSGFTFRSYGMSW |
| | | H.42 | VRQAPGKGLEWVALISSGGSYTYYTDSVKGRFTISRD |
| | | | NSKNTLYLQMGSLRAEDMAVYYCSRHGGNFFDYWG |
| | | | QGTTVTVSS |
| SEQ ID NO: 3267 | VH | D- VH- | EVQLVESGGGLVQPGGSLRLSCSVSGFTFRSYGMSWV |
| | | H.43 | RQAPGKGLEWVALISSGGSYTYYTDSVKGRFTISRDN |
| | | | SKNTLYVQMSSLRAEDTAVYYCSRHGGNFFDYWGQ |
| | | | GTTVTVSS |
| SEQ ID NO: 3268 | VH | D- VH- | EVQLVESGGGLVQPGGSLRLSCAVSGFTFRSYGMSW |
| | | H.44 | VRQAPGKGLEWVALISSGGSYTYYTDSVKGRFIISRD |
| | | | NSRNSLYLQKNRRRAEDMAVYYCSRHGGNFFDYWG |
| | | | QGTTVTVSS |
| SEQ ID NO: 3269 | VH | D- VH- | EVQLVESGGGLVQPGGSLRLSCAVSGFTFRSYGMSW |
| | | H.45 | VHQAPGKGLEWVALISSGGSYTYYTDSVKGRFIISRD |
| | | | NSRNTLYLQTNSLRAEDTAVYYCSRHGGNFFDYWGQ |
| | | | GTTVTVSS |
| SEQ ID NO: 3270 | VH | D- VH- | EVHLVESGGGLVQPGGALRLSCAVSGFTFRSYGMSW |
| | | H.46 | VRQATGKGLEWVALISSGGSYTYYTDSVKGRFTISRE |
| | | | NAKNSLYLQMNSLRAGDTAVYYCSRHGGNFFDYWG |
| | | | QGTTVTVSS |
| SEQ ID NO: 3271 | VH | D- VH- | EVQLVESGGGLVQPRGSLRLSCAVSGFTFRSYGMSW |
| | | H.47 | VRQAPGKGLEWVALISSGGSYTYYTDSVKGRFTISRD |
| | | | NSKNTLYLQMNNLRAEGTAVYYCSRHGGNFFDYWG |
| | | | QGTTVTVSS |
| SEQ ID NO: 3272 | VH | D- VH- | EVQLVESGGGLVQPRGSLRLSCAVSGFTFRSYGMSW |
| | | H.48 | VRQAPGKGLEWVALISSGGSYTYYTDSVKGRFTISRD |
| | | | NSKNTLYLQMNNLRAEGTAAYYCSRHGGNFFDYWG |
| | | | QGTTVTVSS |
| SEQ ID NO: 3273 | VH | D- VH- | QVQLVQSGAEVKKPGASVKVSCKVSGFTFRSYGMSW |
| | | H.49 | VRQAPGKGLEWVALISSGGSYTYYTDSVKGRFTITRD |
| | | | NSTNTLYMELSSLRSEDTAVYYCSRHGGNFFDYWGQ |
| | | | GTTVTVSS |
| SEQ ID NO: 3274 | VH | D- VH- | QVQLVQSGSELKKPGASVKVSCKVSGFTFRSYGMSW |
| | | H.50 | VRQAPGQGLEWVALISSGGSYTYYTDSVKGRFVISRD |
| | | | NSVNTLYLQISSLKAEDTAVYYCSRHGGNFFDYWGQ |
| | | | GTTVTVSS |

[0657] In some embodiments, the anti-TCRβ V10 antibody molecule comprises a VH or a VL of an antibody described in Table 12, or a sequence with at least 80%, 85%, 90%, 95%, 96%, 97%, 98%, 99% or more identity thereto.

[0658] In some embodiments, the anti-TCRβ V10 antibody molecule comprises a VH and a VL of an antibody described in Table 12, or a sequence with at least 80%, 85%, 90%, 95%, 96%, 97%, 98%, 99% or more identity thereto.

### Additional Anti-TCRVβ Antibodies

[0659] Additional exemplary anti-TCRβV antibodies of the disclosure are provided in Table 13. In some embodiments, the anti-TCRβV antibody is a humanized antibody, e.g., as provided in Table 13. In some embodiments, the anti-TCRβV antibody comprises one or more (e.g., all three) of a LC CDR1, LC CDR2, and LC CDR3 provided in Table 13; and/or one or more (e.g., all three) of a HC CDR1, HC CDR2, and HC CDR3 provided in Table 13, or a sequence with at least 95% identity thereto. In some embodiments, the anti-TCRβV antibody comprises a variable heavy chain (VH) and/or a variable light chain (VL) provided in Table 13, or a sequence with at least 95% identity thereto.

TABLE 13
Amino acid sequences for additional anti-TCRβ V antibodies
Amino acid and nucleotide sequences for murine and humanized antibody molecules which bind to
various TCRVB families are disclosed. The amino acid the heavy and light chain CDRs, and the amino
acid and nucleotide sequences of the heavy and light chain variable regions, and the heavy and light
chains are shown. Antibodies disclosed in the table include, MPB2D5, CAS1.1.3, IMMU222, REA1062,
JOVI-3, IMMU546 and MR5-2. MPB2D5 binds human TCRβV 20-1 (TCRβV2 per old nomenclature).
CAS1.1.3 binds human TCRβV 27 (TCRβV14 per old nomenclature). IMMU 222 binds human TCRβV
6-5, TCRβV 6-6, or TCRβV 6-9 (TCRβV13.1 per old nomenclature). REA1062 binds human TCRβV 5-
1). JOVI-3 binds human TCRβV 28 (TCRβV3.1 per old nomenclature). IMMU546 binds human TCRβV
2. MR5-2 binds human TCRVβ 13-2.
Binds to human TCRVB 20-1
MPB2D5 (murine), also referred to here as BJ1188, BJ1190 and REA654; or Antibody G
Binds to human TCRVβ 20-1

| | | |
|---|---|---|
| SEQ ID NO: 1102 | HC CDR1 (Kabat) | SAYMH |
| SEQ ID NO: 1103 | HC CDR2 (Kabat) | RIDPATGKTKYAPKFQA |
| SEQ ID NO: 1104 | HC CDR3 (Kabat) | SLNWDYGLDY |
| SEQ ID NO: 1105 | HC CDR1 (Chothia) | GFNIKSA |
| SEQ ID NO: 1106 | HC CDR2 (Chothia) | DPATGK |
| SEQ ID NO: 1104 | HC CDR3 (Chothia) | SLNWDYGLDY |
| SEQ ID NO: 1107 | HC CDR1 (Combined) | GFNIKSAYMH |
| SEQ ID NO: 1103 | HC CDR2 (Combined) | RIDPATGKTKYAPKFQA |
| SEQ ID NO: 1104 | HC CDR3 (Combined) | SLNWDYGLDY |
| SEQ ID NO: 7489 | LC CDR1 (Kabat) | RASKSVSILGTHLIH |
| SEQ ID NO: 1108 | LC CDR2 (Kabat) | AASNLES |
| SEQ ID NO: 1109 | LC CDR3 (Kabat) | QQSIEDPWT |
| SEQ ID NO: 1110 | LC CDR1 (Chothia) | SKSVSILGTHL |
| SEQ ID NO: 1108 | LC CDR2 (Chothia) | AASNLES |
| SEQ ID NO: 1109 | LC CDR3 (Chothia) | QQSIEDPWT |
| SEQ ID NO: 7489 | LC CDR1 (Combined) | RASKSVSILGTHLIH |
| SEQ ID NO: 1108 | LC CDR2 (Combined) | AASNLES |
| SEQ ID NO: 1109 | LC CDR3(Combined) | QQSIEDPWT |
| SEQ ID NO: 1111 | VL | DIVLTQSPASLAVSLGQRATISCRASKSVSILGTH |
| | | LIHWYQQKPGQPPKLLIYAASNLESGVPARFSGS |
| | | GSETVFTLNIHPVEEEDAATYFCQQSIEDPWTFG |
| | | GGTKLGIK |
| SEQ ID NO: 1112 | VH | EVQLQQSVADLVRPGASLKLSCTASGFNIKSAY |
| | | MHWVIQRPDQGPECLGRIDPATGKTKYAPKFQA |
| | | KATITADTSSNTAYLQLSSLTSEDTAIYYCTRSLN |
| | | WDYGLDYWGQGTSVTVSS |

VH for MPB2D5 (humanized) also referred to as Antibody G-H (humanized)
Binds to human TCRVβ 20-1

| | | |
|---|---|---|
| SEQ ID NO: 1113 | VH - 1 | QVQLVQSGAEVKKPGASVKVSCKASGFNIKSAY |
| | | MHWVRQAPGQGLEWMGRIDPATGKTKYAPKF |
| | | QARVTMTADTSTNTAYMELSSLRSEDTAVYYC |
| | | ARSLNWDYGLDYWGQGTLVTVSS |
| SEQ ID NO: 1114 | VH - 2 | QVQLVQSGAEVKKPGASVKVSCKASGFNIKSAY |
| | | MHWVRQAPGQEPGCMGRIDPATGKTKYAPKFQ |
| | | ARVTMTADTSINTAYTELSSLRSEDTATYYCARS |
| | | LNWDYGLDYWGQGTLVTVSS |
| SEQ ID NO: 1115 | VH - 3 | QVQLVQSGAEVKKPGSSVKVSCKASGFNIKSAY |
| | | MHWVRQAPGQGLEWMGRIDPATGKTKYAPKF |
| | | QARVTITADTSTNTAYMELSSLRSEDTAVYYCA |
| | | RSLNWDYGLDYWGQGTLVTVSS |
| SEQ ID NO: 1116 | VH - 4 | QVQLVQSGAEVKKPGASVKVSCKASGFNIKSAY |
| | | MHWVRQAPGQRLEWMGRIDPATGKTKYAPKF |
| | | QARVTITADTSANTAYMELSSLRSEDTAVYYCA |
| | | RSLNWDYGLDYWGQGTLVTVSS |

VL for MPB2D5 (humanized) also referred to as Antibody G-H (humanized)
Binds to human TCRVβ 20-1

| | | |
|---|---|---|
| SEQ ID NO: 1117 | VL - 1 | EIVLTQSPATLSLSPGERATLSCRASKSVSILGTH |
| | | LIHWYQQKPGQAPRLLIYAASNLESGIPARFSGS |
| | | GSETDFTLTISSLEPEDFAVYFCQQSIEDPFGGGT |
| | | KVEIK |
| SEQ ID NO: 1118 | VL - 2 | EIVLTQSPATLSLSPGERATLSCRASKSVSILGTH |
| | | LIHWYQQKPGLAPRLLIYAASNLESGIPDRESGS |
| | | GSETDFTLTISRLEPEDFAVYFCQQSIEDPFGGGT |
| | | KVEIK |
| SEQ ID NO: 1119 | VL - 3 | EIVLTQSPGTLSLSPGERATLSCRASKSVSILGTH |
| | | LIHWYQQKPGQAPRLLIYAASNLESGIPDRESGS |
| | | GSETDFTLTISRLEPEDFAVYFCQQSIEDPFGGGT |
| | | KVEIK |

CAS1.1.3 (murine) also referred to herein as BJ1460; or Antibody H
Binds to human TCRVβ 27

| | | |
|---|---|---|
| SEQ ID NO: 1120 | HC CDR1 (Kabat) | DTYMY |
| SEQ ID NO: 1121 | HC CDR2 (Kabat) | RIDPANGNTKYDPKFQD |
| SEQ ID NO: 1122 | HC CDR3 (Kabat) | GSYYYAMDY |
| SEQ ID NO: 1123 | HC CDR1 (Chothia) | GFKTEDT |
| SEQ ID NO: 1124 | HC CDR2 (Chothia) | DPANGN |
| SEQ ID NO: 1122 | HC CDR3 (Chothia) | GSYYYAMDY |
| SEQ ID NO: 1125 | HC CDR1 (Combined) | GFKTEDTYMY |
| SEQ ID NO: 1121 | HC CDR2 (Combined) | RIDPANGNTKYDPKFQD |
| SEQ ID NO: 1122 | HC CDR3(Combined) | GSYYYAMDY |
| SEQ ID NO: 1126 | LC CDR1 (Kabat) | RASESVDSYGNSFMH |
| SEQ ID NO: 1127 | LC CDR2 (Kabat) | RASNLES |
| SEQ ID NO: 1128 | LC CDR3 (Kabat) | QQSNEDPYT |
| SEQ ID NO: 1129 | LC CDR1 (Chothia) | SESVDSYGNSF |
| SEQ ID NO: 1127 | LC CDR2 (Chothia) | RASNLES |
| SEQ ID NO: 1128 | LC CDR3 (Chothia) | QQSNEDPYT |
| SEQ ID NO: 1126 | LC CDR1 (Combined) | RASESVDSYGNSFMH |
| SEQ ID NO: 1127 | LC CDR2 (Combined) | RASNLES |
| SEQ ID NO: 1128 | LC CDR3(Combined) | QQSNEDPYT |
| SEQ ID NO: 7490 | VL | DIVLTQSPASLAVSLGQRATISCRASESVDSYGN |
| | | SFMHWYQQKPGQPPKLLIYRASNLESGIPARFSG |
| | | SGSRTDFTLTINPVEADDVATYYCQQSNEDPYTF |
| | | GGGTKLEIK |
| SEQ ID NO: 1130 | VH | EVQLQQSGAELVKPGASVKLSCTASGFKTEDTY |
| | | MYWVKQRPEQGLEWIGRIDPANGNTKYDPKFQ |
| | | DKATITADSSSNTAYLQLSSLPSEDTAVYYCARG |
| | | SYYYAMDYWGQGTSVTVSS |

VH for CAS1.1.3 (humanized) also referred to as Antibody H-H (humanized)
Binds to human TCRVβ 27

| | | |
|---|---|---|
| SEQ ID NO: 1131 | VH - 1 | QVQLVQSGAEVKKPGSSVKVSCKASGFKTEDTY |
| | | MYWVRQAPGQGLEWIGRIDPANGNTKYDPKFQ |
| | | DRATITADSSTNTAYMELSSLRSEDTAVYYCAR |
| | | GSYYYAMDYWGQGTLVTVSS |
| SEQ ID NO: 1132 | VH - 2 | QVQLVQSGAEVKKPGASVKVSCKASGFKTEDT |
| | | YMYWVRQAPGQRLEWIGRIDPANGNTKYDPKF |
| | | QDRATITADSSANTAYMELSSLRSEDTAVYYCA |
| | | RGSYYYAMDYWGQGTLVTVSS |
| SEQ ID NO: 1133 | VH - 3 | EVQLVESGGGLVQPGGSLKLSCAASGFKTEDTY |
| | | MYWVRQASGKGLEWIGRIDPANGNTKYDPKFQ |
| | | DRATISADSSKNTAYLQMNSLKTEDTAVYYCAR |
| | | GSYYYAMDYWGQGTLVTVSS |
| SEQ ID NO: 1134 | VH - 4 | EVQLVQSGAEVKKPGESLRISCKASGFKTEDTY |
| | | MYWVRQMPGKGLEWIGRIDPANGNTKYDPKFQ |
| | | DQATISADSSINTAYLQWSSLKASDTAMYYCAR |
| | | GSYYYAMDYWGQGTLVTVSS |
| SEQ ID NO: 1135 | VH - 5 | QVQLVQSGSELKKPGASVKVSCKASGFKTEDTY |
| | | MYWVRQAPGQGLEWIGRIDPANGNTKYDPKFQ |
| | | DRAVISADSSVNTAYLQISSLKAEDTAVYYCAR |
| | | GSYYYAMDYWGQGTLVTVSS |

VL for CAS1.1.3 (humanized) also referred to as Antibody H-H (humanized)
Binds to human TCRVβ 27

| | | |
|---|---|---|
| SEQ ID NO: 1136 | VL - 1 | DIVLTQSPDSLAVSLGERATINCRASESVDSYGN |
| | | SFMHWYQQKPGQPPKLLIYRASNLESGVPDRFS |
| | | GSGSRTDFTLTISSLQAEDVAVYYCQQSNEDPYT |
| | | FGQGTKLEIK |
| SEQ ID NO: 1137 | VL - 2 | EIVLTQSPATLSLSPGERATLSCRASESVDSYGNS |
| | | FMHWYQQKPGQAPKLLIYRASNLESGIPARFSGS |
| | | GSRTDFTLTISRLEPEDFAVYYCQQSNEDPYTFG |
| | | QGTKLEIK |
| SEQ ID NO: 1138 | VL - 3 | DIQLTQSPSSLSASVGDRVTITCRASESVDSYGNS |
| | | FMHWYQQKPGQAPKLLIYRASNLESGVPSRFSG |
| | | SGSRTDFTLTISSLQPEDVATYYCQQSNEDPYTF |
| | | GQGTKLEIK |
| SEQ ID NO: 1139 | VL - 4 | AIQLTQSPSSLSASVGDRVTITCRASESVDSYGNS |
| | | FMHWYQQKPGKAPKLLIYRASNLESGVPSRFSG |
| | | SGSRTDFTLTISSLQPEDFATYYCQQSNEDPYTFG |
| | | QGTKLEIK |
| SEQ ID NO: 1140 | VL - 5 | EIVLTQSPDFQSVTPKEKVTITCRASESVDSYGNS |
| | | FMHWYQQKPDQSPKLLIYRASNLESGVPSRFSG |
| | | SGSRTDFTLTINSLEAEDAATYYCQQSNEDPYTF |
| | | GQGTKLEIK |

IMMU222 (murine) also referred to as BJ1461; or Antibody I
Binds to human TCRVβ 6-5,6-6,6-9

| | | |
|---|---|---|
| SEQ ID NO: 1141 | HC CDR1 (Kabat) | SYAMS |
| SEQ ID NO: 1142 | HC CDR2 (Kabat) | HISNGGDYIYYADTVKG |
| SEQ ID NO: 1143 | HC CDR3 (Kabat) | PSYYSDPWFFDV |
| SEQ ID NO: 1144 | HC CDR1 (Chothia) | GFTFRSY |
| SEQ ID NO: 1145 | HC CDR2 (Chothia) | SNGGDY |
| SEQ ID NO: 1143 | HC CDR3 (Chothia) | PSYYSDPWFFDV |
| SEQ ID NO: 1146 | HC CDR1 (Combined) | GFTFRSYAMS |
| SEQ ID NO: 1142 | HC CDR2 (Combined) | HISNGGDYIYYADTVKG |
| SEQ ID NO: 1143 | HC CDR3(Combined) | PSYYSDPWFFDV |
| SEQ ID NO: 1147 | LC CDR1 (Kabat) | SAGSSVSFMH |
| SEQ ID NO: 1148 | LC CDR2 (Kabat) | DTSKLAS |
| SEQ ID NO: 1149 | LC CDR3 (Kabat) | LOGSGFPLT |
| SEQ ID NO: 1150 | LC CDR1 (Chothia) | GSSVSF |
| SEQ ID NO: 1148 | LC CDR2 (Chothia) | DTSKLAS |
| SEQ ID NO: 1149 | LC CDR3 (Chothia) | LQGSGFPLT |
| SEQ ID NO: 1147 | LC CDR1 (Combined) | SAGSSVSFMH |
| SEQ ID NO: 1148 | LC CDR2 (Combined) | DTSKLAS |
| SEQ ID NO: 1149 | LC CDR3(Combined) | LQGSGFPLT |
| SEQ ID NO: 1151 | VL | ENVLTQSPAIMSASPGEKVTMTCSAGSSVSFMH |
| | | WYQQKSSTSPKLWIYDTSKLASGVPGRFSGSGS |
| | | GNSFSLTISSMEAEDVAIYYCLQGSGFPLTFGSGT |
| | | KLEIK |
| SEQ ID NO: 1152 | VH | DVKLVESGEGLVKPGGSLKLSCAASGFTFRSYA |
| | | MSWVRQTPEKRLEWVAHISNGGDYIYYADTVK |
| | | GRFTISRDNARNTLYLQMSSLKSEDTAMYYCTR |
| | | PSYYSDPWFFDVWGTGTTVTVSS |

VH for IMMU222 (humanized) also referred to as Antibody I-H
Binds to human TCRVβ 6-5,6-6,6-9

| | | |
|---|---|---|
| SEQ ID NO: 1153 | VH - 1 | EVQLVESGGGLVQPGGSLRLSCAASGFTFRSYA |
| | | MSWVRQAPGKGLEWVAHISNGGDYIYYADTVK |
| | | GRFTISRDNAKNSLYLQMNSLRAEDTAVYYCTR |
| | | PSYYSDPWFFDVWGQGTTVTVSS |
| SEQ ID NO: 1154 | VH - 2 | QVQLVESGGGVVQPGRSLRLSCAASGFTFRSYA |
| | | MSWVRQAPGKGLEWVAHISNGGDYIYYADTVK |
| | | GRFTISRDNSKNTLYLQMSSLRAEDTAVYYCTR |
| | | PSYYSDPWFFDVWGQGTTVTVSS |
| SEQ ID NO: 1155 | VH - 3 | EVQLVESGGGLVQPGGSLRLSCAASGFTFRSYA |
| | | MSWVRQAPGKGLEWVAHISNGGDYIYYADTVK |
| | | GRFTISRDNSKNTLYLQMNSLRAEDTAVYYCTR |
| | | PSYYSDPWFFDVWGQGTTVTVSS |
| SEQ ID NO: 1156 | VH - 4 | QVQLVQSGSELKKPGASVKVSCKASGFTFRSYA |
| | | MSWVRQAPGQGLEWVAHISNGGDYIYYADTVK |
| | | GRFVISRDNSVNTLYLQISSLKAEDTAVYYCTRP |
| | | SYYSDPWFFDVWGQGTTVTVSS |
| SEQ ID NO: 1157 | VH - 5 | QVQLVQSGAEVKKPGASVKVSCKASGFTFRSYA |
| | | MSWVRQAPGQRLEWVAHISNGGDYIYYADTVK |
| | | GRFTITRDNSANTLYMELSSLRSEDTAVYYCTRP |
| | | SYYSDPWFFDVWGQGTTVTVSS |

VL for IMMU222 (humanized)) also referred to as Antibody I-H
Binds to human TCRVβ 6-5,6-6,6-9

| | | |
|---|---|---|
| SEQ ID NO: 1158 | VL - 1 | ENVLTQSPATLSLSPGERATLSCSAGSSVSFMHW |
| | | YQQKPGQAPKLLIYDTSKLASGIPARFSGSGSGN |
| | | DFTLTISSLEPEDFAVYYCLQGSGFPLTFGQGTKL |
| | | EIK |
| SEQ ID NO: 1159 | VL - 2 | ENVLTQSPDFQSVTPKEKVTITCSAGSSVSFMHW |
| | | YQQKPDQSPKLLIYDTSKLASGVPSRFSGSGSGN |
| | | DFTLTINSLEAEDAATYYCLQGSGFPLTFGQGTK |
| | | LEIK |
| SEQ ID NO: 1160 | VL - 3 | DNQLTQSPSSLSASVGDRVTITCSAGSSVSFMHW |
| | | YQQKPGKVPKLLIYDTSKLASGVPSRFSGSGSGN |
| | | DFTLTISSLQPEDVATYYCLQGSGFPLTFGQGTK |
| | | LEIK |
| SEQ ID NO: 1161 | VL - 4 | ANQLTQSPSSLSASVGDRVTITCSAGSSVSFMHW |
| | | YQQKPGKAPKLLIYDTSKLASGVPSRFSGSGSGN |
| | | DFTLTISSLQPEDFATYYCLQGSGFPLTFGQGTKL |
| | | EIK |
| SEQ ID NO: 1162 | VL - 5 | DNVLTQSPDSLAVSLGERATINCSAGSSVSFMH |
| | | WYQQKPGQPPKLLIYDTSKLASGVPDRFSGSGS |
| | | GNDFTLTISSLQAEDVAVYYCLQGSGFPLTFGQG |
| | | TKLEIK |

REA1062 (murine), also referred to as BJ1189 or as Antibody J
Binds to human TCRVβ 5-1

| | | |
|---|---|---|
| SEQ ID NO: 1163 | HC CDR1 (Kabat) | DYNIH |
| SEQ ID NO: 1164 | HC CDR2 (Kabat) | YINPYNGRTGYNQKFKA |
| SEQ ID NO: 1165 | HC CDR3 (Kabat) | WDGSSYFDY |
| SEQ ID NO: 1166 | HC CDR1 (Chothia) | GYTFTDYNIH |
| SEQ ID NO: 1167 | HC CDR2 (Chothia) | NPYNGR |
| SEQ ID NO: 1165 | HC CDR3 (Chothia) | WDGSSYFDY |
| SEQ ID NO: 1166 | HC CDR1 (Combined) | GYTFTDYNIH |
| SEQ ID NO: 1164 | HC CDR2 (Combined) | YINPYNGRTGYNQKFKA |
| SEQ ID NO: 1165 | HC CDR3(Combined) | WDGSSYFDY |
| SEQ ID NO: 1168 | LC CDR1 (Kabat) | SASSSVSYMH |
| SEQ ID NO: 1169 | LC CDR2 (Kabat) | EISKLAS |
| SEQ ID NO: 1170 | LC CDR3 (Kabat) | QQWNYPLLT |
| SEQ ID NO: 1171 | LC CDR1 (Chothia) | SSSVSY |
| SEQ ID NO: 1169 | LC CDR2 (Chothia) | EISKLAS |
| SEQ ID NO: 1170 | LC CDR3 (Chothia) | QQWNYPLLT |
| SEQ ID NO: 1168 | LC CDR1 (Combined) | SASSSVSYMH |
| SEQ ID NO: 1169 | LC CDR2 (Combined) | EISKLAS |
| SEQ ID NO: 1170 | LC CDR3(Combined) | QQWNYPLLT |
| SEQ ID NO: 7491 | VL | EIVLTQSPAITAASLGQKVTITCSASSSVSYMHW |
| | | YQQKSGTSPKPWIYEISKLASGVPARFSGSGSGT |
| | | SYSLTISSMEAEDAAIYYCQQWNYPLLTFGAGT |
| | | KLELK |
| SEQ ID NO: 1172 | VH | EVQLQQSGPVLVKPGASVRMSCKASGYTFTDY |
| | | NIHWVKQSHGRSLEWVGYINPYNGRTGYNQKF |
| | | KAKATLTVDKSSSTAYMDLRSLTSEDSAVYYCA |
| | | RWDGSSYFDYWGQGTTLTVSS |

VH for REA1062 (humanized) also referred to as Antibody J-H
Binds to human TCRVβ 5-1

| | | |
|---|---|---|
| SEQ ID NO: 1173 | VH - 1 | QVQLVQSGAEVKKPGSSVKVSCKASGYTFTDY |
| | | NIHWVRQAPGQGLEWVGYINPYNGRTGYNQKF |
| | | KARATLTVDKSTSTAYMELSSLRSEDTAVYYCA |
| | | RWDGSSYFDYWGQGTTVTVSS |
| SEQ ID NO: 1174 | VH - 2 | QVQLVQSGAEVKKPGASVKVSCKASGYTFTDY |
| | | NIHWVRQAPGQGLEWVGYINPYNGRTGYNQKF |
| | | KARATLTVDKSTSTAYMELRSLRSDDMAVYYC |
| | | ARWDGSSYFDYWGQGTTVTVSS |
| SEQ ID NO: 1175 | VH - 3 | QVQLVQSGAEVKKPGASVKVSCKASGYTFTDY |
| | | NIHWVRQATGQGLEWVGYINPYNGRTGYNQKF |
| | | KARATLTVNKSISTAYMELSSLRSEDTAVYYCA |
| | | RWDGSSYFDYWGQGTTVTVSS |
| SEQ ID NO: 1176 | VH - 4 | EVQLVESGGGLVQPGRSLRLSCTASGYTFTDYNI |
| | | HWVRQAPGKGLEWVGYINPYNGRTGYNQKFK |
| | | ARATLSVDKSKSIAYLQMNSLKTEDTAVYYCAR |
| | | WDGSSYFDYWGQGTTVTVSS |
| SEQ ID NO: 1177 | VH - 5 | QVQLVQSGSELKKPGASVKVSCKASGYTFTDYN |
| | | IHWVRQAPGQGLEWVGYINPYNGRTGYNQKFK |
| | | ARAVLSVDKSVSTAYLQISSLKAEDTAVYYCAR |
| | | WDGSSYFDYWGQGTTVTVSS |

VL for REA1062 (humanized) also referred to as Antibody J-H
Binds to human TCRVβ 5-1

| | | |
|---|---|---|
| SEQ ID NO: 1178 | VL - 1 | EIVLTQSPATLSLSPGERATLSCSASSSVSYMHW |
| | | YQQKPGQAPKLLIYEISKLASGIPARFSGSGSGTD |
| | | YTLTISSLEPEDFAVYYCQQWNYPLLTFGQGTKL |
| | | EIK |
| SEQ ID NO: 1179 | VL - 2 | EIVLTQSPATLSLSPGERATLSCSASSSVSYMHW |
| | | YQQKPGQAPKLLIYEISKLASGIPARFSGSGSGTD |
| | | YTLTISRLEPEDFAVYYCQQWNYPLLTFGQGTK |
| | | LEIK |
| SEQ ID NO: 1180 | VL - 3 | EIVLTQSPDFQSVTPKEKVTITCSASSSVSYMHW |
| | | YQQKPDQSPKLLIYEISKLASGVPSRFSGSGSGTD |
| | | YTLTINSLEAEDAATYYCQQWNYPLLTFGQGTK |
| | | LEIK |
| SEQ ID NO: 1181 | VL - 4 | DIQLTQSPSFLSASVGDRVTITCSASSSVSYMHW |
| | | YQQKPGKAPKLLIYEISKLASGVPSRFSGSGSGTE |
| | | YTLTISSLQPEDFATYYCQQWNYPLLTFGQGTKL |
| | | EIK |
| SEQ ID NO: 1182 | VL - 5 | AIQLTQSPSSLSASVGDRVTITCSASSSVSYMHW |
| | | YQQKPGKAPKLLIYEISKLASGVPSRFSGSGSGT |
| | | DYTLTISSLQPEDFATYYCQQWNYPLLTFGQGT |
| | | KLEIK |
| SEQ ID NO: 1183 | VL - 6 | AIRLTQSPFSLSASVGDRVTITCSASSSVSYMHW |
| | | YQQKPAKAPKLFIYEISKLASGVPSRFSGSGSGT |
| | | DYTLTISSLQPEDFATYYCQQWNYPLLTFGQGT |
| | | KLEIK |
| SEQ ID NO: 1184 | VL - 7 | DIVLTQSPDSLAVSLGERATINCSASSSVSYMHW |
| | | YQQKPGQPPKLLIYEISKLASGVPDRFSGSGSGT |
| | | DYTLTISSLQAEDVAVYYCQQWNYPLLTFGQGT |
| | | KLEIK |

JOVI-3 (murine), also referred to as BJ1187 or Antibody K
Binds to human TCRVβ 28

| | | |
|---|---|---|
| SEQ ID NO: 1185 | HC CDR1 (Kabat) | GSWMN |
| SEQ ID NO: 1186 | HC CDR2 (Kabat) | RIYPGDGDTDYSGKFKG |
| SEQ ID NO: 1187 | HC CDR3 (Kabat) | SGYFNYVPVFDY |
| SEQ ID NO: 1188 | HC CDR1 (Chothia) | GYTFSGS |
| SEQ ID NO: 1189 | HC CDR2 (Chothia) | YPGDGD |
| SEQ ID NO: 1187 | HC CDR3 (Chothia) | SGYFNYVPVFDY |
| SEQ ID NO: 1190 | HC CDR1 (Combined) | GYTFSGSWMN |
| SEQ ID NO: 1186 | HC CDR2 (Combined) | RIYPGDGDTDYSGKFKG |
| SEQ ID NO: 1187 | HC CDR3(Combined) | SGYFNYVPVFDY |
| SEQ ID NO: 1191 | LC CDR1 (Kabat) | SANSTVGYIH |
| SEQ ID NO: 1192 | LC CDR2 (Kabat) | TTSNLAS |
| SEQ ID NO: 1193 | LC CDR3 (Kabat) | HQWSFYPT |
| SEQ ID NO: 1194 | LC CDR1 (Chothia) | NSTVGY |
| SEQ ID NO: 1192 | LC CDR2 (Chothia) | TTSNLAS |
| SEQ ID NO: 1193 | LC CDR3 (Chothia) | HQWSFYPT |
| SEQ ID NO: 1191 | LC CDR1 (Combined) | SANSTVGYIH |
| SEQ ID NO: 1192 | LC CDR2 (Combined) | TTSNLAS |
| SEQ ID NO: 1193 | LC CDR3(Combined) | HQWSFYPT |
| SEQ ID NO: 1195 | VL | QIVLTQSPAIMSASLGEEIALTCSANSTVGYIHW |
| | | YQQKSGTSPKLLIYTTSNLASGVPSRFSGSGSGTF |
| | | YSLTISSVEAEDAADYFCHQWSFYPTFGGGTKLE |
| | | IK |
| SEQ ID NO: 1196 | VH | QIQLQQSGPEVVKPGASVQISCKASGYTFSGSW |
| | | MNWVKQRPGKGLEWIGRIYPGDGDTDYSGKFK |
| | | GRATLTADKSSSTAYMRLSSLTSEDSAVYFCARS |
| | | GYFNYVPVFDYWGQGTTLSVSS |

VH for JOVI-3 (humanized) also referred to as Antibody K-H
Binds to human TCRVβ 28

| | | |
|---|---|---|
| SEQ ID NO: 1197 | VH - 1 | QIQLVQSGAEVKKPGASVKVSCKASGYTFSGSW |
| | | MNWVRQAPGQGLEWIGRIYPGDGDTDYSGKFK |
| | | GRATLTADKSTSTAYMELSSLRSEDTAVYYCAR |
| | | SGYFNYVPVFDYWGQGTTVTVSS |
| SEQ ID NO: 1198 | VH - 2 | QIQLVQSGAEVKKPGSSVKVSCKASGYTFSGSW |
| | | MNWVRQAPGQGLEWIGRIYPGDGDTDYSGKFK |
| | | GRATLTADKSTSTAYMELSSLRSEDTAVYYCAR |
| | | SGYFNYVPVFDYWGQGTTVTVSS |
| SEQ ID NO: 1199 | VH - 3 | EIQLVQSGAEVKKPGESLKISCKASGYTFSGSWM |
| | | NWVRQMPGKGLEWIGRIYPGDGDTDYSGKFKG |
| | | QATLSADKSISTAYLQWSSLKASDTAMYYCARS |
| | | GYFNYVPVFDYWGQGTTVTVSS |
| SEQ ID NO: 1200 | VH - 4 | QIQLVQSGSELKKPGASVKVSCKASGYTFSGSW |
| | | MNWVRQAPGQGLEWIGRIYPGDGDTDYSGKFK |
| | | GRAVLSADKSVSTAYLQISSLKAEDTAVYYCAR |
| | | SGYFNYVPVFDYWGQGTTVTVSS |
| SEQ ID NO: 1201 | VH - 5 | QIQLVQSGSELKKPGASVKVSCKASGYTFSGSW |
| | | MNWVRQAPGQGLEWIGRIYPGDGDTDYSGKFK |
| | | GRAVLSADKSVSMAYLQISSLKAEDTAVYYCAR |
| | | SGYFNYVPVFDYWGQGTTVTVSS |
| SEQ ID NO: 1202 | VH - 6 | EIQLVESGGGLVQPGRSLRLSCTASGYTFSGSW |
| | | MNWVRQAPGKGLEWIGRIYPGDGDTDYSGKFK |
| | | GRATLSADKSKSIAYLQMNSLKTEDTAVYYCAR |
| | | SGYFNYVPVFDYWGQGTTVTVSS |

VL for JOVI-3 (humanized) also referred to as Antibody K-H
Binds to human TCRVβ 28

| | | |
|---|---|---|
| SEQ ID NO: 1203 | VL - 1 | EIVLTQSPATLSLSPGERATLSCSANSTVGYIHW |
| | | YQQKPGQAPKLLIYTTSNLASGIPARFSGSGSGT |
| | | DYTLTISSLEPEDFAVYFCHQWSFYPTFGQGTKL |
| | | EIK |
| SEQ ID NO: 1204 | VL - 2 | DIQLTQSPSFLSASVGDRVTITCSANSTVGYIHW |
| | | YQQKPGKAPKLLIYTTSNLASGVPSRFSGSGSGT |
| | | EYTLTISSLQPEDFATYFCHQWSFYPTFGQGTKL |
| | | EIK |
| SEQ ID NO: 1205 | VL - 3 | EIVLTQSPATLSLSPGERATLSCSANSTVGYIHW |
| | | YQQKPGQAPKLLIYTTSNLASGIPARFSGSGPGT |
| | | DYTLTISSLEPEDFAVYFCHQWSFYPTFGQGTKL |
| | | EIK |
| SEQ ID NO: 1206 | VL - 4 | DIVLTQSPDSLAVSLGERATINCSANSTVGYIHW |
| | | YQQKPGQPPKLLIYTTSNLASGVPDRFSGSGSGT |
| | | DYTLTISSLQAEDVAVYFCHQWSFYPTFGQGTK |
| | | LEIK |
| SEQ ID NO: 1207 | VL - 5 | EIVLTQSPDFQSVTPKEKVTITCSANSTVGYIHW |
| | | YQQKPDQSPKLLIYTTSNLASGVPSRFSGSGSGT |
| | | DYTLTINSLEAEDAATYFCHQWSFYPTFGQGTK |
| | | LEIK |

ZOE (murine), also referred to as BJ1538 or as Antibody L
Binds to human TCRVβ 4-1,4-2,4-3

| | | |
|---|---|---|
| SEQ ID NO: 1208 | HC CDR1 (Kabat) | DYYMY |
| SEQ ID NO: 1209 | HC CDR2 (Kabat) | TISGGGSYTYSPDSVKG |
| SEQ ID NO: 1210 | HC CDR3 (Kabat) | ERDIYYGNFNAMVY |
| SEQ ID NO: 1211 | HC CDR1 (Chothia) | GFTFSDY |
| SEQ ID NO: 1212 | HC CDR2 (Chothia) | SGGGSY |
| SEQ ID NO: 1210 | HC CDR3 (Chothia) | ERDIYYGNFNAMVY |
| SEQ ID NO: 1213 | HC CDR1 (Combined) | GFTFSDYYMY |
| SEQ ID NO: 1209 | HC CDR2 (Combined) | TISGGGSYTYSPDSVKG |
| SEQ ID NO: 1210 | HC CDR3(Combined) | ERDIYYGNFNAMVY |
| SEQ ID NO: 1214 | LC CDR1 (Kabat) | RASKSVSTSGYSYMH |
| SEQ ID NO: 1215 | LC CDR2 (Kabat) | LASNLES |
| SEQ ID NO: 1216 | LC CDR3 (Kabat) | QHSRDLPWT |
| SEQ ID NO: 1217 | LC CDR1 (Chothia) | SKSVSTSGYSY |
| SEQ ID NO: 1215 | LC CDR2 (Chothia) | LASNLES |
| SEQ ID NO: 1216 | LC CDR3 (Chothia) | QHSRDLPWT |
| SEQ ID NO: 1214 | LC CDR1 (Combined) | RASKSVSTSGYSYMH |
| SEQ ID NO: 1215 | LC CDR2 (Combined) | LASNLES |
| SEQ ID NO: 1216 | LC CDR3(Combined) | QHSRDLPWT |
| SEQ ID NO: 1218 | VL | DIVLTQSPVSLTVSLGQRATISCRASKSVSTSGYS |
| | | YMHWYQQKPGQPPKLLIYLASNLESGVPARFSG |
| | | SGSGTDFTLNIHPVEEEDAATYYCQHSRDLPWTF |
| | | GGGTKLEIK |
| SEQ ID NO: 1219 | VH | EVQLVESGGGLVKPGGSLKLSCAASGFTFSDYY |
| | | MYWVRQTPEKRLEWVATISGGGSYTYSPDSVK |
| | | GRFTISRDNAKNNLYLQMSSLRSEDTAMYFCAR |
| | | ERDIYYGNFNAMVYWGRGTSVTVSS |

VH for ZOE (humanized) also referred to as Antibody L-H
Binds to human TCRVβ 4-1,4-2,4-3

| | | |
|---|---|---|
| SEQ ID NO: 1220 | VH - 1 | EVQLLESGGGLVQPGGSLRLSCAASGFTFSDYY |
| | | MYWVRQAPGKGLEWVATISGGGSYTYSPDSVK |
| | | GRFTISRDNSKNTLYLQMNSLRAEDTAVYYCAR |
| | | ERDIYYGNFNAMVYWGRGTLVTVSS |
| SEQ ID NO: 1221 | VH - 2 | EVQLVESGGGLVQPGGSLRLSCAASGFTFSDYY |
| | | MYWVRQAPGKGLEWVATISGGGSYTYSPDSVK |
| | | GRFTISRDNAKNSLYLQMNSLRAEDTAVYYCAR |
| | | ERDIYYGNFNAMVYWGRGTLVTVSS |
| SEQ ID NO: 1222 | VH - 3 | QVQLVESGGGVVQPGRSLRLSCAASGFTFSDY |
| | | YMYWVRQAPGKGLEWVATISGGGSYTYSPDS |
| | | VKGRFTISRDNSKNTLYLQMNSLRAEDTAVYY |
| | | CARERDIYYGNFNAMVYWGRGTLVTVSS |
| SEQ ID NO: 1223 | VH - 4 | QVQLVESGGGLVKPGGSLRLSCAASGFTFSDYY |
| | | MYWIRQAPGKGLEWVATISGGGSYTYSPDSVK |
| | | GRFTISRDNAKNSLYLQMNSLRAEDTAVYYCAR |
| | | ERDIYYGNFNAMVYWGRGTLVTVSS |

VL for ZOE (humanized) also referred to as Antibody L-H
Binds to human TCRVβ 4-1,4-2,4-3

| | | |
|---|---|---|
| SEQ ID NO: 1224 | VL - 1 | EIVLTQSPGTLSLSPGERATLSCRASKSVSTSGYS |
| | | YMHWYQQKPGQAPRLLIYLASNLESGIPDRFSG |
| | | SGSGTDFTLTISRLEPEDFAVYYCQHSRDLPWTF |
| | | GGGTKVEIK |
| SEQ ID NO: 1225 | VL - 2 | EIVLTQSPATLSLSPGERATLSCRASKSVSTSGYS |
| | | YMHWYQQKPGQAPRLLIYLASNLESGIPARFSG |
| | | SGSGTDFTLTISSLEPEDFAVYYCQHSRDLPWTF |
| | | GGGTKVEIK |
| SEQ ID NO: 1226 | VL - 3 | DIQLTQSPSTLSASVGDRVTITCRASKSVSTSGYS |
| | | YMHWYQQKPGKAPKLLIYLASNLESGVPSRFSG |
| | | SGSGTEFTLTISSLQPDDFATYYCQHSRDLPWTF |
| | | GGGTKVEIK |
| SEQ ID NO: 1227 | VL - 4 | AIQLTQSPSSLSASVGDRVTITCRASKSVSTSGYS |
| | | YMHWYQQKPGKAPKLLIYLASNLESGVPSRFSG |
| | | SGSGTDFTLTISSLQPEDFATYYCQHSRDLPWTF |
| | | GGGTKVEIK |

Anti-TCRvb19 (murine), also referred to as BJ1465; or Antibody M
Binds to human TCRVβ 19

| | | |
|---|---|---|
| SEQ ID NO: 1229 | HC CDR1 (Kabat) | GYFWN |
| SEQ ID NO: 1230 | HC CDR2 (Kabat) | YISYDGSNNYNPSLKN |
| SEQ ID NO: 1231 | HC CDR3 (Kabat) | PSPGTGYAVDY |
| SEQ ID NO: 1232 | HC CDR1 (Chothia) | GYSITSGY |
| SEQ ID NO: 1233 | HC CDR2 (Chothia) | SYDGSN |
| SEQ ID NO: 1231 | HC CDR3 (Chothia) | PSPGTGYAVDY |
| SEQ ID NO: 1234 | HC CDR1 (Combined) | GYSITSGYFWN |
| SEQ ID NO: 1230 | HC CDR2 (Combined) | YISYDGSNNYNPSLKN |
| SEQ ID NO: 1231 | HC CDR3(Combined) | PSPGTGYAVDY |
| SEQ ID NO: 1235 | LC CDR1 (Kabat) | RSSQSLVHSNGNTYLH |
| SEQ ID NO: 1236 | LC CDR2 (Kabat) | KVSNRFS |
| SEQ ID NO: 1237 | LC CDR3 (Kabat) | SQSTHVPFT |
| SEQ ID NO: 1238 | LC CDR1 (Chothia) | SQSLVHSNGNTY |
| SEQ ID NO: 1236 | LC CDR2 (Chothia) | KVSNRFS |
| SEQ ID NO: 1237 | LC CDR3 (Chothia) | SQSTHVPFT |
| SEQ ID NO: 1235 | LC CDR1 (Combined) | RSSQSLVHSNGNTYLH |
| SEQ ID NO: 1236 | LC CDR2 (Combined) | KVSNRFS |
| SEQ ID NO: 1237 | LC CDR3(Combined) | SQSTHVPFT |
| SEQ ID NO: 1239 | VL | NVVMTQTPLSLPVSLGDQASISCRSSQSLVHSNG |
| | | NTYLHWYLQKPGQSPKFLIYKVSNRFSGVPDRF |
| | | SGGGSGTEFTLKISRVEAEDLGVYFCSQSTHVPF |
| | | TFGSGTKLEIK |
| SEQ ID NO: 1240 | \|VH | NVQLQESGPGLVKPSQSLSLTCSVAGYSITSGYF |
| | | WNWIRQFPGNKLEWMGYISYDGSNNYNPSLKN |
| | | RISITRDTSKNQFFLKLNSVTTEDTATYYCASPSP |
| | | GTGYAVDYWGQGTSVTVSS |

VH for Anti-TCRvb19 (humanized) also referred to as Antibody M-H
Binds to human TCRVβ 19

| | | |
|---|---|---|
| SEQ ID NO: 1241 | VH - 1 | QVQLQESGPGLVKPSETLSLTCTVSGYSITSGYF |
| | | WNWIRQPPGKGLEWIGYISYDGSNNYNPSLKNR |
| | | VTISRDTSKNQFSLKLSSVTAADTAVYYCASPSP |
| | | GTGYAVDYWGQGTLVTVSS |
| SEQ ID NO: 1242 | VH - 2 | QVQLQESGPGLVKPSETLSLTCTVSGYSITSGYF |
| | | WNWIRQPPGKGLEWIGYISYDGSNNYNPSLKNR |
| | | VTISRDTSKNQFSLKLSSVTAADTAVYYCASPSP |
| | | GTGYAVDYWGQGTLVTVSS |
| SEQ ID NO: 1243 | VH - 3 | QVQLVESGGGLVQPGGSLRLSCSVSGYSITSGYF |
| | | WNWVRQAPGKGLEWVGYISYDGSNNYNPSLK |
| | | NRFTISRDTSKNTFYLQMNSLRAEDTAVYYCAS |
| | | PSPGTGYAVDYWGQGTLVTVSS |

VL for Anti-TCRvb19 (humanized) also referred to as Antibody M-H
Binds to human TCRVβ 19

| | | |
|---|---|---|
| SEQ ID NO: 1244 | VL - 1 | VVMTQSPGTLSLSPGERATLSCRSSQSLVHSNGN |
| | | TYLHWYQQKPGQAPRFLIYKVSNRFSGIPDRFSG |
| | | SGSGTDFTLTISRLEPEDFAVYFCSQSTHVPFTFG |
| | | QGTKLEIK |
| SEQ ID NO: 1245 | VL - 2 | EVVMTQSPATLSLSPGERATLSCRSSQSLVHSNG |
| | | NTYLHWYQQKPGQAPRFLIYKVSNRFSGIPARFS |
| | | GSGSGTDFTLTISSLEPEDFAVYFCSQSTHVPFTF |
| | | GQGTKLEIK |
| SEQ ID NO: 1246 | VL - 3 | EVVMTQSPATLSVSPGERATLSCRSSQSLVHSNG |
| | | NTYLHWYQQKPGQAPRFLIYKVSNRFSGIPARFS |
| | | GSGSGTEFTLTISSLQSEDFAVYFCSQSTHVPFTF |
| | | GQGTKLEIK |
| SEQ ID NO: 1247 | VL - 4 | DVQMTQSPSSLSASVGDRVTITCRSSQSLVHSNG |
| | | NTYLHWYQQKPGKAPKFLIYKVSNRFSGVPSRF |
| | | SGSGSGTDFTFTISSLQPEDIATYFCSQSTHVPFTF |
| | | GQGTKLEIK |

BL37.2 (murine), also referred to as BJ1539 or Antibody N
Binds to human TCRVβ 9

| | | |
|---|---|---|
| SEQ ID NO: 1248 | HC CDR1 (Kabat) | DYIVH |
| SEQ ID NO: 1249 | HC CDR2 (Kabat) | WINTYTGTPTYADDFEG |
| SEQ ID NO: 1250 | HC CDR3 (Kabat) | SWRRGIRGIGFDY |
| SEQ ID NO: 1251 | HC CDR1 (Chothia) | GYTFTDY |
| SEQ ID NO: 1252 | HC CDR2 (Chothia) | NTYTGT |
| SEQ ID NO: 1250 | HC CDR3 (Chothia) | SWRRGIRGIGFDY |
| SEQ ID NO: 1253 | HC CDR1 (Combined) | GYTFTDYIVH |
| SEQ ID NO: 1249 | HC CDR2 (Combined) | WINTYTGTPTYADDFEG |
| SEQ ID NO: 1250 | HC CDR3(Combined) | SWRRGIRGIGFDY |
| SEQ ID NO: 1254 | LC CDR1 (Kabat) | KASKSINKYLA |
| SEQ ID NO: 1255 | LC CDR2 (Kabat) | DGSTLQS |
| SEQ ID NO: 1256 | LC CDR3 (Kabat) | QQHNEYPPT |
| SEQ ID NO: 1257 | LC CDR1 (Chothia) | SKSINKY |
| SEQ ID NO: 1255 | LC CDR2 (Chothia) | DGSTLQS |
| SEQ ID NO: 1256 | LC CDR3 (Chothia) | QQHNEYPPT |
| SEQ ID NO: 1254 | LC CDR1 (Combined) | KASKSINKYLA |
| SEQ ID NO: 1255 | LC CDR2 (Combined) | DGSTLQS |
| SEQ ID NO: 1256 | LC CDR3(Combined) | QQHNEYPPT |
| SEQ ID NO: 1258 | VL | DVQMTQSPYNLAASPGESVSINCKASKSINKYLA |
| | | WYQQKPGKPNKLLIYDGSTLQSGIPSRFSGSGSG |
| | | TDFTLTIRGLEPEDFGLYYCQQHNEYPPTFGAGT |
| | | KLELK |
| SEQ ID NO: 1259 | VH | QLQLVQSGPELREPGESVKISCKASGYTFTDYIV |
| | | HWVKQAPGKGLKWMGWINTYTGTPTYADDFE |
| | | GRFVFSLEASASTANLQISNLKNEDTATYFCARS |
| | | WRRGIRGIGFDYWGQGVMVTVSS |

VH for BL37.2 (humanized) also referred to as Antibody N-H
Binds to human TCRVβ 9

| | | |
|---|---|---|
| SEQ ID NO: 1260 | VH - 1 | QLQLVQSGAEVKKPGASVKVSCKASGYTFTDYI |
| | | VHWVRQAPGQGLEWMGWINTYTGTPTYADDF |
| | | EGWVTMTLDASISTAYMELSRLRSDDTAVYYC |
| | | ARSWRRGIRGIGFDYWGQGTMVTVSS |
| SEQ ID NO: 1261 | VH - 2 | QLQLVQSGAEVKKPGASVKVSCKASGYTFTDYI |
| | | VHWVRQAPGQGLEWMGWINTYTGTPTYADDF |
| | | EGRVTMTLDASTSTAYMELSSLRSEDTAVYYCA |
| | | RSWRRGIRGIGFDYWGQGTMVTVSS |
| SEQ ID NO: 1262 | VH - 3 | QLQLVQSGAEVKKPGASVKVSCKASGYTFTDYI |
| | | VHWVRQAPGQRLEWMGWINTYTGTPTYADDF |
| | | EGRVTITLDASASTAYMELSSLRSEDMAVYYCA |
| | | RSWRRGIRGIGFDYWGQGTMVTVSS |
| SEQ ID NO: 1263 | VH - 4 | QLQLVQSGAEVKKPGASVKVSCKASGYTFTDYI |
| | | VHWVRQATGQGLEWMGWINTYTGTPTYADDF |
| | | EGRVTMTLNASISTAYMELSSLRSEDTAVYYCA |
| | | RSWRRGIRGIGFDYWGQGTMVTVSS |

VL for BL37.2 (humanized) also referred to as Antibody N-H
Binds to human TCRVβ 9

| | | |
|---|---|---|
| SEQ ID NO: 1264 | VL - 1 | EVVMTQSPGTLSLSPGERATLSCKASKSINKYLA |
| | | WYQQKPGQAPRLLIYDGSTLQSGIPDRFSGSGSG |
| | | TDFTLTISRLEPEDFAVYYCQQHNEYPPTFGQGT |
| | | KLEIK |
| SEQ ID NO: 1265 | VL - 2 | EVVMTQSPATLSLSPGERATLSCKASKSINKYLA |
| | | WYQQKPGQAPRLLIYDGSTLQSGIPARFSGSGSG |
| | | TDFTLTISSLEPEDFAVYYCQQHNEYPPTFGQGT |
| | | KLEIK |
| SEQ ID NO: 1266 | VL - 3 | DVQMTQSPSSLSASVGDRVTITCKASKSINKYLA |
| | | WYQQKPGKAPKLLIYDGSTLQSGVPSRFSGSGS |
| | | GTDFTLTISSLQPEDFATYYCQQHNEYPPTFGQG |
| | | TKLEIK |
| SEQ ID NO: 1267 | VL - 4 | AVRMTQSPSSFSASTGDRVTITCKASKSINKYLA |
| | | WYQQKPGKAPKLLIYDGSTLQSGVPSRFSGSGS |
| | | GTDFTLTISCLOSEDFATYYCQQHNEYPPTFGQG |
| | | TKLEIK |

IG125 (murine) binds to TRVβ 11-2; also referred to as Antibody O

| | | |
|---|---|---|
| SEQ ID NO: 1268 | HC CDR1 (Kabat) | NYGVH |
| SEQ ID NO: 1269 | HC CDR2 (Kabat) | VIWSDGSTDYDTAFIS |
| SEQ ID NO: 1270 | HC CDR3 (Kabat) | RAVVADFDY |
| SEQ ID NO: 1271 | HC CDR1 (Chothia) | GFSLTN |
| SEQ ID NO: 1272 | HC CDR2 (Chothia) | VIWSDGSTD |
| SEQ ID NO: 1270 | HC CDR3 (Chothia) | RAVVADFDY |
| SEQ ID NO: 1273 | HC CDR1 (combined) | GFSLTNYGVH |
| SEQ ID NO: 1269 | HC CDR2 (combined) | VIWSDGSTDYDTAFIS |
| SEQ ID NO: 1270 | HC CDR3 (combined) | RAVVADFDY |
| SEQ ID NO: 1274 | VH | QVQLKQSGPGLLQPSQSLSITCTVSGFSLTNYGV |
| | | HWVRQSPGKGLEWLGVIWSDGSTDYDTAFISRL |
| | | SISKDNSKSQVFFKLNSLQADDTAIYYCARRAV |
| | | VADFDYWGQGTTLTVSS |
| SEQ ID NO:1275 | LC CDR1 (Kabat) | KASKEVTIFGSISALH |
| SEQ ID NO: 1276 | LC CDR2 (Kabat) | NGAKLES |
| SEQ ID NO: 1277 | LC CDR3 (Kabat) | LQNKEVPFT |
| SEQ ID NO:1275 | LC CDR1 (Chothia) | KASKEVTIFGSISALH |
| SEQ ID NO:1276 | LC CDR2 (Chothia) | NGAKLES |
| SEQ ID NO: 1277 | LC CDR3 (Chothia) | LQNKEVPFT |
| SEQ ID NO: 1275 | LC CDR1 (combined) | KASKEVTIFGSISALH |
| SEQ ID NO: 1276 | LC CDR2 (combined) | NGAKLES |
| SEQ ID NO: 1277 | LC CDR3 (combined) | LQNKEVPFT |
| SEQ ID NO: 1278 | VL | DIVLTQSPASLAVSLGQKATISCKASKEVTIFGSI |
| | | SALHWYQQKPGQPPKLIYNGAKLESGVSARFS |
| | | DSGSQNRSPFGNQLSFTLTIAPVEADDAATYYC |
| | | LQNKEVPFTFGSGTKLEIK |

VL for IG125 (humanized) also referred to as Antibody O-H
binds to TRβV 11-2

| | | |
|---|---|---|
| SEQ ID NO: 1279 | VL-1 | DIVLTQSPDSLAVSLGERATINCKASKEVTIFGSI |
| | | SALHWYQQKPGQPPKLLYNGAKLESGVSARFG |
| | | VPDRFSRSGSGLDFTLTISSLQAEDVAVYYCLQ |
| | | NKEVPFTFGQGTKLEIK |
| SEQ ID NO: 1280 | VL-2 | EIVLTQSPDFQSVTPKEKVTITCKASKEVTIFGSI |
| | | SALHWYQQKPDQSPKLLYNGAKLESGVSARFG |
| | | VPSRFSRSGSGLDFTLTINSLEAEDAATYYCLQN |
| | | KEVPFTFGQGTKLEIK |
| SEQ ID NO: 1281 | VL-3 | AIQLTQSPSSLSASVGDRVTITCKASKEVTIFGSI |
| | | SALHWYQQKPGKAPKLLYNGAKLESGVSARF |
| | | GVPSRFSRSGSGLDFTLTISSLQPEDFATYYCLQ |
| | | NKEVPFTFGQGTKLEIK |
| SEQ ID NO: 1282 | VL-4 | DIVLTQTPLSLSVTPGQPASISCKASKEVTIFGSIS |
| | | ALHWYLQKPGQPPKLLYNGAKLESGVSARFGV |
| | | PDRFSRSGSGLDFTLKISRVEAEDVGVYYCLQN |
| | | KEVPFTFGQGTKLEIK |

VH for IG125 (humanized) also referred to as Antibody O-H
binds to TRVβ 11-2

| | | |
|---|---|---|
| SEQ ID NO: 1283 | VH-1 | QVTLKESGPVLVKPTETLTLTCTVSGFSLTNYG |
| | | VHWVRQPPGKALEWLGVIWSDGSTDYDTAFIS |
| | | RLTISKDNSKSQVVLTMTNMDPVDTATYYCAR |
| | | RAVVADFDYWGQGTTVTVSS |
| SEQ ID NO: 1284 | VH-2 | QVQLQESGPGLVKPSGTLSLTCAVSGFSLTNYG |
| | | VHWVRQPPGKGLEWLGVIWSDGSTDYDTAFIS |
| | | RLTISKDNSKSQVSLKLSSVTAADTAVYYCARR |
| | | AVVADFDYWGQGTTVTVSS |
| SEQ ID NO: 1285 | VH-3 | QVQLQQSGPGLVKPSQTLSLTCAVSGFSLTNYG |
| | | VHWVRQSPSRGLEWLGVIWSDGSTDYDTAFIS |
| | | RLTINKDNSKSQVSLQLNSVTPEDTAVYYCARR |
| | | AVVADFDYWGQGTTVTVSS |
| SEQ ID NO: 1286 | VH-4 | EVQLVESGGGLVQPGPSLRLSCTVSGFSLTNYG |
| | | VHWVRQAPGKGLEWLGVIWSDGSTDYDTAFIS |
| | | RLTISKDNSKSIVYLQMNSLKTEDTAVYYCARR |
| | | AVVADFDYWGQGTTVTVSS |
| SEQ ID NO: 1287 | VH-5 | EVQLVQSGAEVKKPGESLRISCKVSGFSLTNYG |
| | | VHWVRQMPGKGLEWLGVIWSDGSTDYDTAFI |
| | | SQLTISKDNSISTVYLQWSSLKASDTAMYYCAR |
| | | RAVVADFDYWGQGTTVTVSS |

MR5-2 (murine), Binds to human TCRVβ 13-2

| | | |
|---|---|---|
| SEQ ID NO: 1376 | SCFV (VH + VL) | QVQLQQSGTELMKPGASVKISCKASGYTFSNY |
| | | WIEWIKQRPGHGLEWVGEILPGAGPTNYNEKF |
| | | KGKATFTADSSSNTAYMQLSSLTSEDSAVYYC |
| | | ARTDYDYDWFAYWGQGTLVTVSAGGGGSGG |
| | | GGSGGGGSGGGGSDIVMSQSPSSLAVSVGEKV |
| | | TMSCKSSQSLLYSGNQKNYLAWYQQKPGQSPK |
| | | LLIYWASTRESGVPDRFTGSGSGTDFTLTINSVK |
| | | AEDLTVYYCQQYYGYPRTFGGGTKVEIK |

### Anti-TCRVβ Antibody Effector Function and Fc Variants

[0660] In some embodiments, an anti-TCRVβ antibody disclosed herein comprises an Fc region, e.g., as described herein. In some embodiments, the Fc region is a wildtype Fc region, e.g., a wildtype human Fc region. In some embodiments, the Fc region comprises a variant, e.g., an Fc region comprising an addition, substitution, or deletion of at least one amino acid residue in the Fc region which results in, e.g., reduced or ablated affinity for at least one Fc receptor.

[0661] The Fc region of an antibody interacts with a number of receptors or ligands including Fc Receptors (e.g., FcγRI, FcγRIIA, FcγRIIIA), the complement protein CIq, and other molecules such as proteins A and G. These interactions are essential for a variety of effector functions and downstream signaling events including: antibody dependent cell-mediated cytotoxicity (ADCC), Antibody-dependent cellular phagocytosis (ADCP) and complement dependent cytotoxicity (CDC).

[0662] In some embodiments, an anti-TCRVβ antibody comprising a variant Fc region has reduced, e.g., ablated, affinity for an Fc receptor, e.g., an Fc receptor described herein. In some embodiments, the reduced affinity is compared to an otherwise similar antibody with a wildtype Fc region.

[0663] In some embodiments, an anti-TCRVβ antibody comprising a variant Fc region has one or more of the following properties: (1) reduced effector function (e.g., reduced ADCC, ADCP and/or CDC); (2) reduced binding to one or more Fc receptors; and/or (3) reduced binding to C1q complement. In some embodiments, the reduction in any one, or all of properties (1)-(3) is compared to an otherwise similar antibody with a wildtype Fc region.

[0664] In some embodiments, an anti-TCRVβ antibody comprising a variant Fc region has reduced affinity to a human Fc receptor, e.g., FcγR I, FcγR II and/or FcγR III. In some embodiments, the anti-TCRVβ antibody comprising a variant Fc region comprises a human IgG1 region or a human IgG4 region.

[0665] In some embodiments, an anti-TCRVβ antibody comprising a variant Fc region activates and/or expands T cells, e.g., as described herein. In some embodiments, an anti-TCRVβ antibody comprising a variant Fc region has a cytokine profile described herein, e.g., a cytokine profile that differs from a cytokine profile of a T cell engager that binds to a receptor or molecule other than a TCRβV region (“a non-TCRβV-binding T cell engager”). In some embodiments, the non-TCRβV-binding T cell engager comprises an antibody that binds to a CD3 molecule (e.g., CD3 epsilon (CD3e) molecule); or a TCR alpha (TCRα) molecule.

[0666] Exemplary Fc region variants are provided in Table 14 and also disclosed in Saunders 0, (2019) Frontiers in Immunology; vol 10, article1296, the entire contents of which is hereby incorporated by reference.

[0667] In some embodiments, an anti-TCRVβ antibody disclosed herein comprises any one or all, or any combination of Fc region variants, e.g., mutations, disclosed in Table 14. In some embodiments, an anti-TCRVβ antibody disclosed herein comprise an Asn297Ala (N297A) mutation. In some embodiments, an anti-TCRVβ antibody disclosed herein comprise a Leu234Ala/Leu235Ala (LALA) mutation.

TABLE 14
Exemplary Fc modifications

| Modification or mutation | Altered effector function |
|---|---|
| Leu235Glu | ADCC; |
| Leu234Ala/Leu235Ala (LALA) | ADCC; ADCP; CDC |
| Ser228Pro/Leu235Glu | |
| Leu234Ala/Leu235Ala/Pro329Gly | ADCP |
| Pro331Ser/Leu234Glu/Leu235Phe | CDC |
| Asp265Ala | ADCC, ADCP |
| Gly237Ala | ADCP |
| Glu318Ala | ADCP |
| Glu233Pro | |
| Gly236Arg/Leu328Arg | ADCC |
| His268Gln/Val309Leu/Ala330Ser/Pro331Ser | ADCC; ADCP; CDC |
| Val234Ala/Gly237Ala/Pro238Ser/ | ADCC; ADCP; CDC |
| His268Ala/Val309Leu/Ala330Ser/Pro331Ser | |
| Leu234Ala/L235Ala/Gly237Ala/P238Ser/ | ADCC; CDC |
| His268Ala/Ala330Ser/Pro331Ser | |
| Ala330Leu | CDC |
| Asp270Ala | CDC |
| Lys322Ala | CDC |
| Pro329Ala | CDC |
| Pro331Ala | CDC |
| Val264Ala | CDC |
| High mannose glycosylation | CDC |
| Phe241Ala | CDC |
| Asn297Ala or Gly or Gln | ADCC; ADCP; CDC |
| S228P/Phe234Ala/Leu235Ala | ADCC; CDC |

### Natural Killer Cell Engagers

[0668] Natural Killer (NK) cells recognize and destroy tumors and virus-infected cells in an antibody-independent manner. The regulation of NK cells is mediated by activating and inhibiting receptors on the NK cell surface. One family of activating receptors is the natural cytotoxicity receptors (NCRs) which include NKp30, NKp44 and NKp46. The NCRs initiate tumor targeting by recognition of heparan sulfate on cancer cells. NKG2D is a receptor that provides both stimulatory and costimulatory innate immune responses on activated killer (NK) cells, leading to cytotoxic activity. DNAM1 is a receptor involved in intercellular adhesion, lymphocyte signaling, cytotoxicity and lymphokine secretion mediated by cytotoxic T-lymphocyte (CTL) and NK cell. DAP10 (also known as HCST) is a transmembrane adapter protein which associates with KLRK1 to form an activation receptor KLRK1-HCST in lymphoid and myeloid cells; this receptor plays a major role in triggering cytotoxicity against target cells expressing cell surface ligands such as MHC class I chain-related MICA and MICB, and U(optionally L1)6-binding proteins (ULBPs); it KLRK1-HCST receptor plays a role in immune surveillance against tumors and is required for cytolysis of tumors cells; indeed, melanoma cells that do not express KLRK1 ligands escape from immune surveillance mediated by NK cells. CD16 is a receptor for the Fc region of IgG, which binds complexed or aggregated IgG and also monomeric IgG and thereby mediates antibody-dependent cellular cytotoxicity (ADCC) and other antibody-dependent responses, such as phagocytosis.

[0669] The present disclosure provides, inter alia, multispecific (e.g., bi-, tri-, quad-specific) or multifunctional molecules, that are engineered to contain one or more NK cell engagers that mediate binding to and/or activation of an NK cell. Accordingly, in some embodiments, the NK cell engager is selected from an antigen binding domain or ligand that binds to (e.g., activates): NKp30, NKp40, NKp44, NKp46, NKG2D, DNAM1, DAP10, CD16 (e.g., CD16a, CD16b, or both), CRTAM, CD27, PSGL1, CD96, CD100 (SEMA4D), NKp80, CD244 (also known as SLAMF4 or 2B4), SLAMF6, SLAMF7, KIR2DS2, KIR2DS4, KIR3DS1, KIR2DS3, KIR2DS5, KIR2DS1, CD94, NKG2C, NKG2E, or CD160.

[0670] In some embodiments, the NK cell engager is an antigen binding domain that binds to NKp30 (e.g., NKp30 present, e.g., expressed or displayed, on the surface of an NK cell) and comprises any CDR amino acid sequence, framework region (FWR) amino acid sequence, or variable region amino acid sequence disclosed in Tables 7, 8, 35, 36, 9, 10, or 34. In some embodiments, the NK cell engager is an antigen binding domain that binds to NKp30 (e.g., NKp30 present, e.g., expressed or displayed, on the surface of an NK cell) and comprises any CDR amino acid sequence, framework region (FWR) amino acid sequence, or variable region amino acid sequence disclosed in U.S. Pat. Nos. 6,979,546, 9,447,185, PCT Application No. WO2015121383A1, PCT Application No.

[0671] WO2016110468A1, PCT Application No. WO2004056392A1, or U.S. Application Publication No. US20070231322A1, the sequences of which are hereby incorporated by reference. In some embodiments, binding of the NK cell engager, e.g., antigen binding domain that binds to NKp30, to the NK cell activates the NK cell. An antigen binding domain that binds to NKp30 (e.g., NKp30 present, e.g., expressed or displayed, on the surface of an NK cell) may be said to target NKp30, the NK cell, or both.

[0672] In some embodiments, the antigen binding domain that binds to NKp30 comprises one or more CDRs (e.g., VHCDR1, VHCDR2, VHCDR3, VLCDR1, VLCDR2, and/or VLCDR3) disclosed in Table 7, Table 34, or Table 8, or a sequence having at least 85%, 90%, 95%, or 99% identity thereto. In some embodiments, the antigen binding domain that binds to NKp30 comprises one or more framework regions (e.g., VHFWR1, VHFWR2, VHFWR3, VHFWR4, VLFWR1, VLFWR2, VLFWR3, and/or VLFWR4) disclosed in Table 7, Table 34, or Table 8, or a sequence having at least 85%, 90%, 95%, or 99% identity thereto.

[0673] In some embodiments, the antigen binding domain that binds to NKP30 comprises one or more CDRs (e.g., VHCDR1, VHCDR2, VHCDR3, VLCDR1, VLCDR2, and/or VLCDR3) disclosed in Table 35 and/or Table 36, or a sequence having at least 85%, 90%, 95%, or 99% identity thereto. In some embodiments, the antigen binding domain that binds to NKP30 comprises one or more framework regions (e.g., VHFWR1, VHFWR2, VHFWR3, VHFWR4, VLFWR1, VLFWR2, VLFWR3, and/or VLFWR4) disclosed in Table 35 and/or Table 36, or a sequence having at least 85%, 90%, 95%, or 99% identity thereto.

[0674] In some embodiments, the antigen binding domain that binds to NKp30 comprises a VH and/or a VL disclosed in Table 9, or a sequence having at least 85%, 90%, 95%, or 99% identity thereto. In some embodiments, any of the VH domains disclosed in Table 9 may be paired with any of the VL domains disclosed in Table 9 to form the antigen binding domain that binds to NKp30. In some embodiments, the antigen binding domain that binds to NKp30 comprises an amino acid sequence disclosed in Table 10, or a sequence having at least 85%, 90%, 95%, or 99% identity thereto.

[0675] In some embodiments, the antigen binding domain that binds to NKp30 comprises a VH comprising a heavy chain complementarity determining region 1 (VHCDR1), a VHCDR2, and a VHCDR3, and a VL comprising a light chain complementarity determining region 1 (VLCDR1), a VLCDR2, and a VLCDR3.

[0676] In some embodiments, the VHCDR1, VHCDR2, and VHCDR3 comprise the amino acid sequences of SEQ ID NOs: 7313, 6001, and 7315, respectively (or a sequence having at least 85%, 90%, 95%, or 99% identity thereto). In some embodiments, the VHCDR1, VHCDR2, and VHCDR3 comprise the amino acid sequences of SEQ ID NOs: 7313, 6001, and 6002, respectively (or a sequence having at least 85%, 90%, 95%, or 99% identity thereto). In some embodiments, the VHCDR1, VHCDR2, and VHCDR3 comprise the amino acid sequences of SEQ ID NOs: 7313, 6008, and 6009, respectively (or a sequence having at least 85%, 90%, 95%, or 99% identity thereto). In some embodiments, the VHCDR1, VHCDR2, and VHCDR3 comprise the amino acid sequences of SEQ ID NOs: 7313, 7385, and 7315, respectively (or a sequence having at least 85%, 90%, 95%, or 99% identity thereto). In some embodiments, the VHCDR1, VHCDR2, and VHCDR3 comprise the amino acid sequences of SEQ ID NOs: 7313, 7318, and 6009, respectively (or a sequence having at least 85%, 90%, 95%, or 99% identity thereto).

[0677] In some embodiments, the VLCDR1, VLCDR2, and VLCDR3 comprise the amino acid sequences of SEQ ID NOs: 7326, 7327, and 7329, respectively (or a sequence having at least 85%, 90%, 95%, or 99% identity thereto). In some embodiments, the VLCDR1, VLCDR2, and VLCDR3 comprise the amino acid sequences of SEQ ID NOs: 6063, 6064, and 7293, respectively (or a sequence having at least 85%, 90%, 95%, or 99% identity thereto). In some embodiments, the VLCDR1, VLCDR2, and VLCDR3 comprise the amino acid sequences of SEQ ID NOs: 6070, 6071, and 6072, respectively (or a sequence having at least 85%, 90%, 95%, or 99% identity thereto). In some embodiments, the VLCDR1, VLCDR2, and VLCDR3 comprise the amino acid sequences of SEQ ID NOs: 6070, 6064, and 7321, respectively (or a sequence having at least 85%, 90%, 95%, or 99% identity thereto).

[0678] In some embodiments, the VHCDR1, VHCDR2, VHCDR3, VLCDR1, VLCDR2, and VLCDR3 comprise the amino acid sequences of SEQ ID NOs: 7313, 6001, 7315, 7326, 7327, and 7329, respectively (or a sequence having at least 85%, 90%, 95%, or 99% identity thereto). In some embodiments, the VHCDR1, VHCDR2, VHCDR3, VLCDR1, VLCDR2, and VLCDR3 comprise the amino acid sequences of SEQ ID NOs: 7313, 6001, 6002, 6063, 6064, and 7293, respectively (or a sequence having at least 85%, 90%, 95%, or 99% identity thereto). In some embodiments, the VHCDR1, VHCDR2, VHCDR3, VLCDR1, VLCDR2, and VLCDR3 comprise the amino acid sequences of SEQ ID NOs: 7313, 6008, 6009, 6070, 6071, and 6072, respectively (or a sequence having at least 85%, 90%, 95%, or 99% identity thereto). In some embodiments, the VHCDR1, VHCDR2, VHCDR3, VLCDR1, VLCDR2, and VLCDR3 comprise the amino acid sequences of SEQ ID NOs: 7313, 7385, 7315, 6070, 6064, and 7321, respectively (or a sequence having at least 85%, 90%, 95%, or 99% identity thereto). In some embodiments, the VHCDR1, VHCDR2, VHCDR3, VLCDR1, VLCDR2, and VLCDR3 comprise the amino acid sequences of SEQ ID NOs: 7313, 7318, 6009, 6070, 6064, and 7321, respectively (or a sequence having at least 85%, 90%, 95%, or 99% identity thereto).

[0679] In some embodiments, the VH comprises an amino acid sequence selected from the group consisting of SEQ ID NOs: 7298 or 7300-7304 (or a sequence having at least 85%, 90%, 95%, or 99% identity thereto) and/or the VL comprises an amino acid sequence selected from the group consisting of SEQ ID NOs: 7299 or 7305-7309 (or a sequence having at least 85%, 90%, 95%, or 99% identity thereto). In some embodiments, the VH and VL comprise the amino acid sequences of SEQ ID NOs: 7302 and 7305, respectively (or a sequence having at least 85%, 90%, 95%, or 99% identity thereto). In some embodiments, the VH and VL comprise the amino acid sequences of SEQ ID NOs: 7302 and 7309, respectively (or a sequence having at least 85%, 90%, 95%, or 99% identity thereto).

[0680] In some embodiments, the VH comprises an amino acid sequence selected from the group consisting of SEQ ID NOs: 6121 or 6123-6128 (or a sequence having at least 85%, 90%, 95%, or 99% identity thereto) and/or the VL comprises an amino acid sequence selected from the group consisting of SEQ ID NOs: 7294 or 6137-6141 (or a sequence having at least 85%, 90%, 95%, or 99% identity thereto). In some embodiments, the VH comprises an amino acid sequence selected from the group consisting of SEQ ID NOs: 6122 or 6129-6134 (or a sequence having at least 85%, 90%, 95%, or 99% identity thereto) and/or the VL comprises an amino acid sequence selected from the group consisting of SEQ ID NOs: 6136 or 6142-6147 (or a sequence having at least 85%, 90%, 95%, or 99% identity thereto). In some embodiments, the VH and VL comprise the amino acid sequences of SEQ ID NOs: 7295 and 7296, respectively (or a sequence having at least 85%, 90%, 95%, or 99% identity thereto). In some embodiments, the VH and VL comprise the amino acid sequences of SEQ ID NOs: 7297 and 7296, respectively (or a sequence having at least 85%, 90%, 95%, or 99% identity thereto). In some embodiments, the VH and VL comprise the amino acid sequences of SEQ ID NOs: 6122 and 6136, respectively (or a sequence having at least 85%, 90%, 95%, or 99% identity thereto).

[0681] In some embodiments, the antigen binding domain that binds to NKp30 comprises the amino acid sequence of SEQ ID NO: 7310 (or a sequence having at least 85%, 90%, 95%, or 99% identity thereto). In some embodiments, the antigen binding domain that binds to NKp30 comprises the amino acid sequence of SEQ ID NO: 7311 (or a sequence having at least 85%, 90%, 95%, or 99% identity thereto). In some embodiments, the antigen binding domain that binds to NKp30 comprises the amino acid sequence of SEQ ID NO: 6187, 6188, 6189 or 6190 (or a sequence having at least 85%, 90%, 95%, or 99% identity thereto).

[0682] In some embodiments, the antigen binding domain that targets NKp30 comprises a VH comprising a heavy chain complementarity determining region 1 (VHCDR1) amino acid sequence of SEQ ID NO: 6000 (or a sequence with no more than 1, 2, 3, or 4 mutations, e.g., substitutions, additions, or deletions), a VHCDR2 amino acid sequence of SEQ ID NO: 6001 (or a sequence with no more than 1, 2, 3, or 4 mutations, e.g., substitutions, additions, or deletions), and/or a VHCDR3 amino acid sequence of SEQ ID NO: 6002 (or a sequence with no more than 1, 2, 3, or 4 mutations, e.g., substitutions, additions, or deletions). In some embodiments, the NKp30 antigen binding domain comprises a VH comprising a VHCDR1 amino acid sequence of SEQ ID NO: 6000, a VHCDR2 amino acid sequence of SEQ ID NO: 6001, and/or a VHCDR3 amino acid sequence of SEQ ID NO: 6002.

[0683] In some embodiments, the antigen binding domain that targets NKp30 comprises a VL comprising a light chain complementarity determining region 1 (VLCDR1) amino acid sequence of SEQ ID NO: 6063 (or a sequence with no more than 1, 2, 3, or 4 mutations, e.g., substitutions, additions, or deletions), a VLCDR2 amino acid sequence of SEQ ID NO: 6064 (or a sequence with no more than 1, 2, 3, or 4 mutations, e.g., substitutions, additions, or deletions), and/or a VLCDR3 amino acid sequence of SEQ ID NO: 7293 (or a sequence with no more than 1, 2, 3, or 4 mutations, e.g., substitutions, additions, or deletions). In some embodiments, the antigen binding domain that targets NKp30 comprises a VL comprising a VLCDR1 amino acid sequence of SEQ ID NO: 6063, a VLCDR2 amino acid sequence of SEQ ID NO: 6064, and a VLCDR3 amino acid sequence of SEQ ID NO: 7293.

[0684] In some embodiments, the antigen binding domain that targets NKp30 comprises a VH comprising a heavy chain complementarity determining region 1 (VHCDR1) amino acid sequence of SEQ ID NO: 6000 (or a sequence with no more than 1, 2, 3, or 4 mutations, e.g., substitutions, additions, or deletions), a VHCDR2 amino acid sequence of SEQ ID NO: 6001 (or a sequence with no more than 1, 2, 3, or 4 mutations, e.g., substitutions, additions, or deletions), and/or a VHCDR3 amino acid sequence of SEQ ID NO: 6002 (or a sequence with no more than 1, 2, 3, or 4 mutations, e.g., substitutions, additions, or deletions), and a VL comprising a light chain complementarity determining region 1 (VLCDR1) amino acid sequence of SEQ ID NO: 6063 (or a sequence with no more than 1, 2, 3, or 4 mutations, e.g., substitutions, additions, or deletions), a VLCDR2 amino acid sequence of SEQ ID NO: 6064 (or a sequence with no more than 1, 2, 3, or 4 mutations, e.g., substitutions, additions, or deletions), and/or a VLCDR3 amino acid sequence of SEQ ID NO: 7293 (or a sequence with no more than 1, 2, 3, or 4 mutations, e.g., substitutions, additions, or deletions). In some embodiments, the NKp30 antigen binding domain comprises a VH comprising a VHCDR1 amino acid sequence of SEQ ID NO: 6000, a VHCDR2 amino acid sequence of SEQ ID NO: 6001, and/or a VHCDR3 amino acid sequence of SEQ ID NO: 6002, and a VL comprising a VLCDR1 amino acid sequence of SEQ ID NO: 6063, a VLCDR2 amino acid sequence of SEQ ID NO: 6064, and a VLCDR3 amino acid sequence of SEQ ID NO: 7293.

[0685] In some embodiments, the antigen binding domain that targets NKp30 comprises a VH comprising a heavy chain complementarity determining region 1 (VHCDR1) amino acid sequence of SEQ ID NO: 6007 (or a sequence with no more than 1, 2, 3, or 4 mutations, e.g., substitutions, additions, or deletions), a VHCDR2 amino acid sequence of SEQ ID NO: 6008 (or a sequence with no more than 1, 2, 3, or 4 mutations, e.g., substitutions, additions, or deletions), and/or a VHCDR3 amino acid sequence of SEQ ID NO: 6009 (or a sequence with no more than 1, 2, 3, or 4 mutations, e.g., substitutions, additions, or deletions). In some embodiments, the NKp30 antigen binding domain comprises a VH comprising a VHCDR1 amino acid sequence of SEQ ID NO: 6007, a VHCDR2 amino acid sequence of SEQ ID NO: 6008, and/or a VHCDR3 amino acid sequence of SEQ ID NO: 6009.

[0686] In some embodiments, the antigen binding domain that targets NKp30 comprises a VL comprising a light chain complementarity determining region 1 (VLCDR1) amino acid sequence of SEQ ID NO: 6070 (or a sequence with no more than 1, 2, 3, or 4 mutations, e.g., substitutions, additions, or deletions), a VLCDR2 amino acid sequence of SEQ ID NO: 6071 (or a sequence with no more than 1, 2, 3, or 4 mutations, e.g., substitutions, additions, or deletions), and/or a VLCDR3 amino acid sequence of SEQ ID NO: 6072 (or a sequence with no more than 1, 2, 3, or 4 mutations, e.g., substitutions, additions, or deletions). In some embodiments, the antigen binding domain that targets NKp30 comprises a VL comprising a VLCDR1 amino acid sequence of SEQ ID NO: 6070, a VLCDR2 amino acid sequence of SEQ ID NO: 6071, and a VLCDR3 amino acid sequence of SEQ ID NO: 6072.

[0687] In some embodiments, the antigen binding domain that targets NKp30 comprises a VH comprising a heavy chain complementarity determining region 1 (VHCDR1) amino acid sequence of SEQ ID NO: 6007 (or a sequence with no more than 1, 2, 3, or 4 mutations, e.g., substitutions, additions, or deletions), a VHCDR2 amino acid sequence of SEQ ID NO: 6008 (or a sequence with no more than 1, 2, 3, or 4 mutations, e.g., substitutions, additions, or deletions), and/or a VHCDR3 amino acid sequence of SEQ ID NO: 6009 (or a sequence with no more than 1, 2, 3, or 4 mutations, e.g., substitutions, additions, or deletions), and a VL comprising a light chain complementarity determining region 1 (VLCDR1) amino acid sequence of SEQ ID NO: 6070 (or a sequence with no more than 1, 2, 3, or 4 mutations, e.g., substitutions, additions, or deletions), a VLCDR2 amino acid sequence of SEQ ID NO: 6071 (or a sequence with no more than 1, 2, 3, or 4 mutations, e.g., substitutions, additions, or deletions), and/or a VLCDR3 amino acid sequence of SEQ ID NO: 6072 (or a sequence with no more than 1, 2, 3, or 4 mutations, e.g., substitutions, additions, or deletions). In some embodiments, the NKp30 antigen binding domain comprises a VH comprising a VHCDR1 amino acid sequence of SEQ ID NO: 6007, a VHCDR2 amino acid sequence of SEQ ID NO: 6008, and/or a VHCDR3 amino acid sequence of SEQ ID NO: 6009, and a VL comprising a VLCDR1 amino acid sequence of SEQ ID NO: 6070, a VLCDR2 amino acid sequence of SEQ ID NO: 6071, and a VLCDR3 amino acid sequence of SEQ ID NO: 6072.

[0688] In some embodiments, the antigen binding domain that targets NKp30 comprises a VH comprising a heavy chain framework region 1 (VHFWR1) amino acid sequence of SEQ ID NO: 6003, a VHFWR2 amino acid sequence of SEQ ID NO: 6004, a VHFWR3 amino acid sequence of SEQ ID NO: 6005, and/or a VHFWR4 amino acid sequence of SEQ ID NO: 6006.

[0689] In some embodiments, the antigen binding domain that targets NKp30 comprises a VL comprising a light chain framework region 1 (VLFWR1) amino acid sequence of SEQ ID NO: 6066, a VLFWR2 amino acid sequence of SEQ ID NO: 6067, a VLFWR3 amino acid sequence of SEQ ID NO: 7292, and/or a VLFWR4 amino acid sequence of SEQ ID NO: 6069.

[0690] In some embodiments, the antigen binding domain that targets NKp30 comprises a VH comprising a heavy chain framework region 1 (VHFWR1) amino acid sequence of SEQ ID NO: 6003, a VHFWR2 amino acid sequence of SEQ ID NO: 6004, a VHFWR3 amino acid sequence of SEQ ID NO: 6005, and/or a VHFWR4 amino acid sequence of SEQ ID NO: 6006, and a VL comprising a light chain framework region 1 (VLFWR1) amino acid sequence of SEQ ID NO: 6066, a VLFWR2 amino acid sequence of SEQ ID NO: 6067, a VLFWR3 amino acid sequence of SEQ ID NO: 7292, and/or a VLFWR4 amino acid sequence of SEQ ID NO: 6069.

[0691] In some embodiments, the antigen binding domain that targets NKp30 comprises a VH comprising a VHFWR1 amino acid sequence of SEQ ID NO: 6003 (or a sequence with no more than 1, 2, 3, 4, 5, or 6 mutations, e.g., substitutions, additions, or deletions, therefrom), a VHFWR2 amino acid sequence of SEQ ID NO: 6004 (or a sequence with no more than 1, 2, 3, 4, 5, or 6 mutations, e.g., substitutions, additions, or deletions, therefrom), a VHFWR3 amino acid sequence of SEQ ID NO: 6005 (or a sequence with no more than 1, 2, 3, 4, 5, 6, 7, 8, 9, 10, or 11 mutations, e.g., substitutions, additions, or deletions), and/or a VHFWR4 amino acid sequence of SEQ ID NO: 6006.

[0692] In some embodiments, the antigen binding domain that targets NKp30 comprises a VL comprising a VLFWR1 amino acid sequence of SEQ ID NO: 6066 (or a sequence with no more than 1, 2, or 3 mutations, e.g., substitutions, additions, or deletions), a VLFWR2 amino acid sequence of SEQ ID NO: 6067 (or a sequence with no more than 1 mutation, e.g., substitution, addition, or deletion), a VLFWR3 amino acid sequence of SEQ ID NO: 7292 (or a sequence with no more than 1 mutation, e.g., substitution, addition, or deletion), and/or a VLFWR4 amino acid sequence of SEQ ID NO: 6069.

[0693] In some embodiments, the antigen binding domain that targets NKp30 comprises a VH comprising a VHFWR1 amino acid sequence of SEQ ID NO: 6003 (or a sequence with no more than 1, 2, 3, 4, 5, or 6 mutations, e.g., substitutions, additions, or deletions, therefrom), a VHFWR2 amino acid sequence of SEQ ID NO: 6004 (or a sequence with no more than 1, 2, 3, 4, 5, or 6 mutations, e.g., substitutions, additions, or deletions, therefrom), a VHFWR3 amino acid sequence of SEQ ID NO: 6005 (or a sequence with no more than 1, 2, 3, 4, 5, 6, 7, 8, 9, 10, or 11 mutations, e.g., substitutions, additions, or deletions), and/or a VHFWR4 amino acid sequence of SEQ ID NO: 6006, and a VL comprising a VLFWR1 amino acid sequence of SEQ ID NO: 6066 (or a sequence with no more than 1, 2, or 3 mutations, e.g., substitutions, additions, or deletions), a VLFWR2 amino acid sequence of SEQ ID NO: 6067 (or a sequence with no more than 1 mutation, e.g., substitution, addition, or deletion), a VLFWR3 amino acid sequence of SEQ ID NO: 7292 (or a sequence with no more than 1 mutation, e.g., substitution, addition, or deletion), and/or a VLFWR4 amino acid sequence of SEQ ID NO: 6069.

[0694] In some embodiments, the antigen binding domain that targets NKp30 comprises a VH comprising a heavy chain framework region 1 (VHFWR1) amino acid sequence of SEQ ID NO: 6010, a VHFWR2 amino acid sequence of SEQ ID NO: 6011, a VHFWR3 amino acid sequence of SEQ ID NO: 6012, and/or a VHFWR4 amino acid sequence of SEQ ID NO: 6013.

[0695] In some embodiments, the antigen binding domain that targets NKp30 comprises a VL comprising a light chain framework region 1 (VLFWR1) amino acid sequence of SEQ ID NO: 6073, a VLFWR2 amino acid sequence of SEQ ID NO: 6074, a VLFWR3 amino acid sequence of SEQ ID NO: 6075, and/or a VLFWR4 amino acid sequence of SEQ ID NO: 6076.

[0696] In some embodiments, the antigen binding domain that targets NKp30 comprises a VH comprising a heavy chain framework region 1 (VHFWR1) amino acid sequence of SEQ ID NO: 6010, a VHFWR2 amino acid sequence of SEQ ID NO: 6011, a VHFWR3 amino acid sequence of SEQ ID NO: 6012, and/or a VHFWR4 amino acid sequence of SEQ ID NO: 6013, and a VL comprising a light chain framework region 1 (VLFWR1) amino acid sequence of SEQ ID NO: 6073, a VLFWR2 amino acid sequence of SEQ ID NO: 6074, a VLFWR3 amino acid sequence of SEQ ID NO: 6075, and/or a VLFWR4 amino acid sequence of SEQ ID NO: 6076.

[0697] In some embodiments, the antigen binding domain that targets NKp30 comprises a VH comprising a VHFWR1 amino acid sequence of SEQ ID NO: 6010 (or a sequence with no more than 1, 2, 3, 4, 5, or 6 mutations, e.g., substitutions, additions, or deletions, therefrom), a VHFWR2 amino acid sequence of SEQ ID NO: 6011 (or a sequence with no more than 1, 2, 3, 4, 5, or 6 mutations, e.g., substitutions, additions, or deletions, therefrom), a VHFWR3 amino acid sequence of SEQ ID NO: 6012 (or a sequence with no more than 1, 2, 3, 4, 5, 6, 7, 8, 9, 10, or 11 mutations, e.g., substitutions, additions, or deletions), and/or a VHFWR4 amino acid sequence of SEQ ID NO: 6013.

[0698] In some embodiments, the antigen binding domain that targets NKp30 comprises a VL comprising a VLFWR1 amino acid sequence of SEQ ID NO: 6073 (or a sequence with no more than 1, 2, or 3 mutations, e.g., substitutions, additions, or deletions), a VLFWR2 amino acid sequence of SEQ ID NO: 6074 (or a sequence with no more than 1 mutation, e.g., substitution, addition, or deletion), a VLFWR3 amino acid sequence of SEQ ID NO: 6075 (or a sequence with no more than 1 mutation, e.g., substitution, addition, or deletion), and/or a VLFWR4 amino acid sequence of SEQ ID NO: 6076.

[0699] In some embodiments, the antigen binding domain that targets NKp30 comprises a VH comprising a VHFWR1 amino acid sequence of SEQ ID NO: 6010 (or a sequence with no more than 1, 2, 3, 4, 5, or 6 mutations, e.g., substitutions, additions, or deletions, therefrom), a VHFWR2 amino acid sequence of SEQ ID NO: 6011 (or a sequence with no more than 1, 2, 3, 4, 5, or 6 mutations, e.g., substitutions, additions, or deletions, therefrom), a VHFWR3 amino acid sequence of SEQ ID NO: 6012 (or a sequence with no more than 1, 2, 3, 4, 5, 6, 7, 8, 9, 10, or 11 mutations, e.g., substitutions, additions, or deletions), and/or a VHFWR4 amino acid sequence of SEQ ID NO: 6013, and a VL comprising a VLFWR1 amino acid sequence of SEQ ID NO: 6073 (or a sequence with no more than 1, 2, or 3 mutations, e.g., substitutions, additions, or deletions), a VLFWR2 amino acid sequence of SEQ ID NO: 6074 (or a sequence with no more than 1 mutation, e.g., substitution, addition, or deletion), a VLFWR3 amino acid sequence of SEQ ID NO: 6075 (or a sequence with no more than 1 mutation, e.g., substitution, addition, or deletion), and/or a VLFWR4 amino acid sequence of SEQ ID NO: 6076.

[0700] In some embodiments, the antigen binding domain that targets NKp30 comprises a VH comprising a heavy chain framework region 1 (VHFWR1) amino acid sequence of SEQ ID NO: 6014, a VHFWR2 amino acid sequence of SEQ ID NO: 6015, a VHFWR3 amino acid sequence of SEQ ID NO: 6016, and/or a VHFWR4 amino acid sequence of SEQ ID NO: 6017.

[0701] In some embodiments, the antigen binding domain that targets NKp30 comprises a VH comprising a VHFWR1 amino acid sequence of SEQ ID NO: 6014 (or a sequence with no more than 1, 2, 3, 4, 5, or 6 mutations, e.g., substitutions, additions, or deletions, therefrom), a VHFWR2 amino acid sequence of SEQ ID NO: 6015 (or a sequence with no more than 1, 2, 3, 4, 5, or 6 mutations, e.g., substitutions, additions, or deletions, therefrom), a VHFWR3 amino acid sequence of SEQ ID NO: 6016 (or a sequence with no more than 1, 2, 3, 4, 5, 6, 7, 8, 9, 10, or 11 mutations, e.g., substitutions, additions, or deletions), and/or a VHFWR4 amino acid sequence of SEQ ID NO: 6017.

[0702] In some embodiments, the antigen binding domain that targets NKp30 comprises a VL comprising a light chain framework region 1 (VLFWR1) amino acid sequence of SEQ ID NO: 6077, a VLFWR2 amino acid sequence of SEQ ID NO: 6078, a VLFWR3 amino acid sequence of SEQ ID NO: 6079, and/or a VLFWR4 amino acid sequence of SEQ ID NO: 6080.

[0703] In some embodiments, the antigen binding domain that targets NKp30 comprises a VL comprising a VLFWR1 amino acid sequence of SEQ ID NO: 6077 (or a sequence with no more than 1, 2, or 3 mutations, e.g., substitutions, additions, or deletions), a VLFWR2 amino acid sequence of SEQ ID NO: 6078 (or a sequence with no more than 1 mutation, e.g., substitution, addition, or deletion), a VLFWR3 amino acid sequence of SEQ ID NO: 6079 (or a sequence with no more than 1 mutation, e.g., substitution, addition, or deletion), and/or a VLFWR4 amino acid sequence of SEQ ID NO: 6080.

[0704] In some embodiments, the antigen binding domain that targets NKp30 comprises a VH comprising a heavy chain framework region 1 (VHFWR1) amino acid sequence of SEQ ID NO: 6018, a VHFWR2 amino acid sequence of SEQ ID NO: 6019, a VHFWR3 amino acid sequence of SEQ ID NO: 6020, and/or a VHFWR4 amino acid sequence of SEQ ID NO: 6021.

[0705] In some embodiments, the antigen binding domain that targets NKp30 comprises a VH comprising a VHFWR1 amino acid sequence of SEQ ID NO: 6018 (or a sequence with no more than 1, 2, 3, 4, 5, or 6 mutations, e.g., substitutions, additions, or deletions, therefrom), a VHFWR2 amino acid sequence of SEQ ID NO: 6019 (or a sequence with no more than 1, 2, 3, 4, 5, or 6 mutations, e.g., substitutions, additions, or deletions, therefrom), a VHFWR3 amino acid sequence of SEQ ID NO: 6020 (or a sequence with no more than 1, 2, 3, 4, 5, 6, 7, 8, 9, 10, or 11 mutations, e.g., substitutions, additions, or deletions), and/or a VHFWR4 amino acid sequence of SEQ ID NO: 6021.

[0706] In some embodiments, the antigen binding domain that targets NKp30 comprises a VL comprising a light chain framework region 1 (VLFWR1) amino acid sequence of SEQ ID NO: 6081, a VLFWR2 amino acid sequence of SEQ ID NO: 6082, a VLFWR3 amino acid sequence of SEQ ID NO: 6083, and/or a VLFWR4 amino acid sequence of SEQ ID NO: 6084.

[0707] In some embodiments, the antigen binding domain that targets NKp30 comprises a VL comprising a VLFWR1 amino acid sequence of SEQ ID NO: 6081 (or a sequence with no more than 1, 2, or 3 mutations, e.g., substitutions, additions, or deletions), a VLFWR2 amino acid sequence of SEQ ID NO: 6082 (or a sequence with no more than 1 mutation, e.g., substitution, addition, or deletion), a VLFWR3 amino acid sequence of SEQ ID NO: 6083 (or a sequence with no more than 1 mutation, e.g., substitution, addition, or deletion), and/or a VLFWR4 amino acid sequence of SEQ ID NO: 6084.

[0708] In some embodiments, the antigen binding domain that targets NKp30 comprises a VH comprising a heavy chain framework region 1 (VHFWR1) amino acid sequence of SEQ ID NO: 6022, a VHFWR2 amino acid sequence of SEQ ID NO: 6023, a VHFWR3 amino acid sequence of SEQ ID NO: 6024, and/or a VHFWR4 amino acid sequence of SEQ ID NO: 6025.

[0709] In some embodiments, the antigen binding domain that targets NKp30 comprises a VH comprising a VHFWR1 amino acid sequence of SEQ ID NO: 6022 (or a sequence with no more than 1, 2, 3, 4, 5, or 6 mutations, e.g., substitutions, additions, or deletions, therefrom), a VHFWR2 amino acid sequence of SEQ ID NO: 6023 (or a sequence with no more than 1, 2, 3, 4, 5, or 6 mutations, e.g., substitutions, additions, or deletions, therefrom), a VHFWR3 amino acid sequence of SEQ ID NO: 6024 (or a sequence with no more than 1, 2, 3, 4, 5, 6, 7, 8, 9, 10, or 11 mutations, e.g., substitutions, additions, or deletions), and/or a VHFWR4 amino acid sequence of SEQ ID NO: 6025.

[0710] In some embodiments, the antigen binding domain that targets NKp30 comprises a VL comprising a light chain framework region 1 (VLFWR1) amino acid sequence of SEQ ID NO: 6085, a VLFWR2 amino acid sequence of SEQ ID NO: 6086, a VLFWR3 amino acid sequence of SEQ ID NO: 6087, and/or a VLFWR4 amino acid sequence of SEQ ID NO: 6088.

[0711] In some embodiments, the antigen binding domain that targets NKp30 comprises a VL comprising a VLFWR1 amino acid sequence of SEQ ID NO: 6085 (or a sequence with no more than 1, 2, or 3 mutations, e.g., substitutions, additions, or deletions), a VLFWR2 amino acid sequence of SEQ ID NO: 6086 (or a sequence with no more than 1 mutation, e.g., substitution, addition, or deletion), a VLFWR3 amino acid sequence of SEQ ID NO: 6087 (or a sequence with no more than 1 mutation, e.g., substitution, addition, or deletion), and/or a VLFWR4 amino acid sequence of SEQ ID NO: 6088.

[0712] In some embodiments, the antigen binding domain that targets NKp30 comprises a VH comprising a heavy chain framework region 1 (VHFWR1) amino acid sequence of SEQ ID NO: 6026, a VHFWR2 amino acid sequence of SEQ ID NO: 6027, a VHFWR3 amino acid sequence of SEQ ID NO: 6028, and/or a VHFWR4 amino acid sequence of SEQ ID NO: 6029.

[0713] In some embodiments, the antigen binding domain that targets NKp30 comprises a VH comprising a VHFWR1 amino acid sequence of SEQ ID NO: 6026 (or a sequence with no more than 1, 2, 3, 4, 5, or 6 mutations, e.g., substitutions, additions, or deletions, therefrom), a VHFWR2 amino acid sequence of SEQ ID NO: 6027 (or a sequence with no more than 1, 2, 3, 4, 5, or 6 mutations, e.g., substitutions, additions, or deletions, therefrom), a VHFWR3 amino acid sequence of SEQ ID NO: 6028 (or a sequence with no more than 1, 2, 3, 4, 5, 6, 7, 8, 9, 10, or 11 mutations, e.g., substitutions, additions, or deletions), and/or a VHFWR4 amino acid sequence of SEQ ID NO: 6029.

[0714] In some embodiments, the antigen binding domain that targets NKp30 comprises a VL comprising a light chain framework region 1 (VLFWR1) amino acid sequence of SEQ ID NO: 6089, a VLFWR2 amino acid sequence of SEQ ID NO: 6090, a VLFWR3 amino acid sequence of SEQ ID NO: 6091, and/or a VLFWR4 amino acid sequence of SEQ ID NO: 6092.

[0715] In some embodiments, the antigen binding domain that targets NKp30 comprises a VL comprising a VLFWR1 amino acid sequence of SEQ ID NO: 6089 (or a sequence with no more than 1, 2, or 3 mutations, e.g., substitutions, additions, or deletions), a VLFWR2 amino acid sequence of SEQ ID NO: 6090 (or a sequence with no more than 1 mutation, e.g., substitution, addition, or deletion), a VLFWR3 amino acid sequence of SEQ ID NO: 6091 (or a sequence with no more than 1 mutation, e.g., substitution, addition, or deletion), and/or a VLFWR4 amino acid sequence of SEQ ID NO: 6092.

[0716] In some embodiments, the antigen binding domain that targets NKp30 comprises a VH comprising a heavy chain framework region 1 (VHFWR1) amino acid sequence of SEQ ID NO: 6030, a VHFWR2 amino acid sequence of SEQ ID NO: 6032, a VHFWR3 amino acid sequence of SEQ ID NO: 6033, and/or a VHFWR4 amino acid sequence of SEQ ID NO: 6034.

[0717] In some embodiments, the antigen binding domain that targets NKp30 comprises a VH comprising a VHFWR1 amino acid sequence of SEQ ID NO: 6030 (or a sequence with no more than 1, 2, 3, 4, 5, or 6 mutations, e.g., substitutions, additions, or deletions, therefrom), a VHFWR2 amino acid sequence of SEQ ID NO: 6032 (or a sequence with no more than 1, 2, 3, 4, 5, or 6 mutations, e.g., substitutions, additions, or deletions, therefrom), a VHFWR3 amino acid sequence of SEQ ID NO: 6033 (or a sequence with no more than 1, 2, 3, 4, 5, 6, 7, 8, 9, 10, or 11 mutations, e.g., substitutions, additions, or deletions), and/or a VHFWR4 amino acid sequence of SEQ ID NO: 6034.

[0718] In some embodiments, the antigen binding domain that targets NKp30 comprises a VL comprising a light chain framework region 1 (VLFWR1) amino acid sequence of SEQ ID NO: 6093, a VLFWR2 amino acid sequence of SEQ ID NO: 6094, a VLFWR3 amino acid sequence of SEQ ID NO: 6095, and/or a VLFWR4 amino acid sequence of SEQ ID NO: 6096.

[0719] In some embodiments, the antigen binding domain that targets NKp30 comprises a VL comprising a VLFWR1 amino acid sequence of SEQ ID NO: 6093 (or a sequence with no more than 1, 2, or 3 mutations, e.g., substitutions, additions, or deletions), a VLFWR2 amino acid sequence of SEQ ID NO: 6094 (or a sequence with no more than 1 mutation, e.g., substitution, addition, or deletion), a VLFWR3 amino acid sequence of SEQ ID NO: 6095 (or a sequence with no more than 1 mutation, e.g., substitution, addition, or deletion), and/or a VLFWR4 amino acid sequence of SEQ ID NO: 6096.

[0720] In some embodiments, the antigen binding domain that targets NKp30 comprises a VH comprising a heavy chain framework region 1 (VHFWR1) amino acid sequence of SEQ ID NO: 6035, a VHFWR2 amino acid sequence of SEQ ID NO: 6036, a VHFWR3 amino acid sequence of SEQ ID NO: 6037, and/or a VHFWR4 amino acid sequence of SEQ ID NO: 6038.

[0721] In some embodiments, the antigen binding domain that targets NKp30 comprises a VH comprising a VHFWR1 amino acid sequence of SEQ ID NO: 6035 (or a sequence with no more than 1, 2, 3, 4, 5, or 6 mutations, e.g., substitutions, additions, or deletions, therefrom), a VHFWR2 amino acid sequence of SEQ ID NO: 6036 (or a sequence with no more than 1, 2, 3, 4, 5, or 6 mutations, e.g., substitutions, additions, or deletions, therefrom), a VHFWR3 amino acid sequence of SEQ ID NO: 6037 (or a sequence with no more than 1, 2, 3, 4, 5, 6, 7, 8, 9, 10, or 11 mutations, e.g., substitutions, additions, or deletions), and/or a VHFWR4 amino acid sequence of SEQ ID NO: 6038.

[0722] In some embodiments, the antigen binding domain that targets NKp30 comprises a VH comprising a heavy chain framework region 1 (VHFWR1) amino acid sequence of SEQ ID NO: 6039, a VHFWR2 amino acid sequence of SEQ ID NO: 6040, a VHFWR3 amino acid sequence of SEQ ID NO: 6041, and/or a VHFWR4 amino acid sequence of SEQ ID NO: 6042.

[0723] In some embodiments, the antigen binding domain that targets NKp30 comprises a VH comprising a VHFWR1 amino acid sequence of SEQ ID NO: 6039 (or a sequence with no more than 1, 2, 3, 4, 5, or 6 mutations, e.g., substitutions, additions, or deletions, therefrom), a VHFWR2 amino acid sequence of SEQ ID NO: 6040 (or a sequence with no more than 1, 2, 3, 4, 5, or 6 mutations, e.g., substitutions, additions, or deletions, therefrom), a VHFWR3 amino acid sequence of SEQ ID NO: 6041 (or a sequence with no more than 1, 2, 3, 4, 5, 6, 7, 8, 9, 10, or 11 mutations, e.g., substitutions, additions, or deletions), and/or a VHFWR4 amino acid sequence of SEQ ID NO: 6042.

[0724] In some embodiments, the antigen binding domain that targets NKp30 comprises a VL comprising a light chain framework region 1 (VLFWR1) amino acid sequence of SEQ ID NO: 6097, a VLFWR2 amino acid sequence of SEQ ID NO: 6098, a VLFWR3 amino acid sequence of SEQ ID NO: 6099, and/or a VLFWR4 amino acid sequence of SEQ ID NO: 6100.

[0725] In some embodiments, the antigen binding domain that targets NKp30 comprises a VL comprising a VLFWR1 amino acid sequence of SEQ ID NO: 6097 (or a sequence with no more than 1, 2, or 3 mutations, e.g., substitutions, additions, or deletions), a VLFWR2 amino acid sequence of SEQ ID NO: 6098 (or a sequence with no more than 1 mutation, e.g., substitution, addition, or deletion), a VLFWR3 amino acid sequence of SEQ ID NO: 6099 (or a sequence with no more than 1 mutation, e.g., substitution, addition, or deletion), and/or a VLFWR4 amino acid sequence of SEQ ID NO: 6100.

[0726] In some embodiments, the antigen binding domain that targets NKp30 comprises a VH comprising a heavy chain framework region 1 (VHFWR1) amino acid sequence of SEQ ID NO: 6043, a VHFWR2 amino acid sequence of SEQ ID NO: 6044, a VHFWR3 amino acid sequence of SEQ ID NO: 6045, and/or a VHFWR4 amino acid sequence of SEQ ID NO: 6046.

[0727] In some embodiments, the antigen binding domain that targets NKp30 comprises a VH comprising a VHFWR1 amino acid sequence of SEQ ID NO: 6043 (or a sequence with no more than 1, 2, 3, 4, 5, or 6 mutations, e.g., substitutions, additions, or deletions, therefrom), a VHFWR2 amino acid sequence of SEQ ID NO: 6044 (or a sequence with no more than 1, 2, 3, 4, 5, or 6 mutations, e.g., substitutions, additions, or deletions, therefrom), a VHFWR3 amino acid sequence of SEQ ID NO: 6045 (or a sequence with no more than 1, 2, 3, 4, 5, 6, 7, 8, 9, 10, or 11 mutations, e.g., substitutions, additions, or deletions), and/or a VHFWR4 amino acid sequence of SEQ ID NO: 6046.

[0728] In some embodiments, the antigen binding domain that targets NKp30 comprises a VL comprising a light chain framework region 1 (VLFWR1) amino acid sequence of SEQ ID NO: 6101, a VLFWR2 amino acid sequence of SEQ ID NO: 6102, a VLFWR3 amino acid sequence of SEQ ID NO: 6103, and/or a VLFWR4 amino acid sequence of SEQ ID NO: 6104.

[0729] In some embodiments, the antigen binding domain that targets NKp30 comprises a VL comprising a VLFWR1 amino acid sequence of SEQ ID NO: 6101 (or a sequence with no more than 1, 2, or 3 mutations, e.g., substitutions, additions, or deletions), a VLFWR2 amino acid sequence of SEQ ID NO: 6102 (or a sequence with no more than 1 mutation, e.g., substitution, addition, or deletion), a VLFWR3 amino acid sequence of SEQ ID NO: 6103 (or a sequence with no more than 1 mutation, e.g., substitution, addition, or deletion), and/or a VLFWR4 amino acid sequence of SEQ ID NO: 6104.

[0730] In some embodiments, the antigen binding domain that targets NKp30 comprises a VH comprising a heavy chain framework region 1 (VHFWR1) amino acid sequence of SEQ ID NO: 6047, a VHFWR2 amino acid sequence of SEQ ID NO: 6048, a VHFWR3 amino acid sequence of SEQ ID NO: 6049, and/or a VHFWR4 amino acid sequence of SEQ ID NO: 6050.

[0731] In some embodiments, the antigen binding domain that targets NKp30 comprises a VH comprising a VHFWR1 amino acid sequence of SEQ ID NO: 6047 (or a sequence with no more than 1, 2, 3, 4, 5, or 6 mutations, e.g., substitutions, additions, or deletions, therefrom), a VHFWR2 amino acid sequence of SEQ ID NO: 6048 (or a sequence with no more than 1, 2, 3, 4, 5, or 6 mutations, e.g., substitutions, additions, or deletions, therefrom), a VHFWR3 amino acid sequence of SEQ ID NO: 6049 (or a sequence with no more than 1, 2, 3, 4, 5, 6, 7, 8, 9, 10, or 11 mutations, e.g., substitutions, additions, or deletions), and/or a VHFWR4 amino acid sequence of SEQ ID NO: 6050.

[0732] In some embodiments, the antigen binding domain that targets NKp30 comprises a VL comprising a light chain framework region 1 (VLFWR1) amino acid sequence of SEQ ID NO: 6105, a VLFWR2 amino acid sequence of SEQ ID NO: 6106, a VLFWR3 amino acid sequence of SEQ ID NO: 6107, and/or a VLFWR4 amino acid sequence of SEQ ID NO: 6108.

[0733] In some embodiments, the antigen binding domain that targets NKp30 comprises a VL comprising a VLFWR1 amino acid sequence of SEQ ID NO: 6105 (or a sequence with no more than 1, 2, or 3 mutations, e.g., substitutions, additions, or deletions), a VLFWR2 amino acid sequence of SEQ ID NO: 6106 (or a sequence with no more than 1 mutation, e.g., substitution, addition, or deletion), a VLFWR3 amino acid sequence of SEQ ID NO: 6107 (or a sequence with no more than 1 mutation, e.g., substitution, addition, or deletion), and/or a VLFWR4 amino acid sequence of SEQ ID NO: 6108.

[0734] In some embodiments, the antigen binding domain that targets NKp30 comprises a VH comprising a heavy chain framework region 1 (VHFWR1) amino acid sequence of SEQ ID NO: 6051, a VHFWR2 amino acid sequence of SEQ ID NO: 6052, a VHFWR3 amino acid sequence of SEQ ID NO: 6053, and/or a VHFWR4 amino acid sequence of SEQ ID NO: 6054.

[0735] In some embodiments, the antigen binding domain that targets NKp30 comprises a VH comprising a VHFWR1 amino acid sequence of SEQ ID NO: 6051 (or a sequence with no more than 1, 2, 3, 4, 5, or 6 mutations, e.g., substitutions, additions, or deletions, therefrom), a VHFWR2 amino acid sequence of SEQ ID NO: 6052 (or a sequence with no more than 1, 2, 3, 4, 5, or 6 mutations, e.g., substitutions, additions, or deletions, therefrom), a VHFWR3 amino acid sequence of SEQ ID NO: 6053 (or a sequence with no more than 1, 2, 3, 4, 5, 6, 7, 8, 9, 10, or 11 mutations, e.g., substitutions, additions, or deletions), and/or a VHFWR4 amino acid sequence of SEQ ID NO: 6054.

[0736] In some embodiments, the antigen binding domain that targets NKp30 comprises a VL comprising a light chain framework region 1 (VLFWR1) amino acid sequence of SEQ ID NO: 6109, a VLFWR2 amino acid sequence of SEQ ID NO: 6110, a VLFWR3 amino acid sequence of SEQ ID NO: 6111, and/or a VLFWR4 amino acid sequence of SEQ ID NO: 6112.

[0737] In some embodiments, the antigen binding domain that targets NKp30 comprises a VL comprising a VLFWR1 amino acid sequence of SEQ ID NO: 6109 (or a sequence with no more than 1, 2, or 3 mutations, e.g., substitutions, additions, or deletions), a VLFWR2 amino acid sequence of SEQ ID NO: 6110 (or a sequence with no more than 1 mutation, e.g., substitution, addition, or deletion), a VLFWR3 amino acid sequence of SEQ ID NO: 6111 (or a sequence with no more than 1 mutation, e.g., substitution, addition, or deletion), and/or a VLFWR4 amino acid sequence of SEQ ID NO: 6112.

[0738] In some embodiments, the antigen binding domain that targets NKp30 comprises a VH comprising a heavy chain framework region 1 (VHFWR1) amino acid sequence of SEQ ID NO: 6055, a VHFWR2 amino acid sequence of SEQ ID NO: 6056, a VHFWR3 amino acid sequence of SEQ ID NO: 6057, and/or a VHFWR4 amino acid sequence of SEQ ID NO: 6058.

[0739] In some embodiments, the antigen binding domain that targets NKp30 comprises a VH comprising a VHFWR1 amino acid sequence of SEQ ID NO: 6055 (or a sequence with no more than 1, 2, 3, 4, 5, or 6 mutations, e.g., substitutions, additions, or deletions, therefrom), a VHFWR2 amino acid sequence of SEQ ID NO: 6056 (or a sequence with no more than 1, 2, 3, 4, 5, or 6 mutations, e.g., substitutions, additions, or deletions, therefrom), a VHFWR3 amino acid sequence of SEQ ID NO: 6057 (or a sequence with no more than 1, 2, 3, 4, 5, 6, 7, 8, 9, 10, or 11 mutations, e.g., substitutions, additions, or deletions), and/or a VHFWR4 amino acid sequence of SEQ ID NO: 6058.

[0740] In some embodiments, the antigen binding domain that targets NKp30 comprises a VL comprising a light chain framework region 1 (VLFWR1) amino acid sequence of SEQ ID NO: 6113, a VLFWR2 amino acid sequence of SEQ ID NO: 6114, a VLFWR3 amino acid sequence of SEQ ID NO: 6115, and/or a VLFWR4 amino acid sequence of SEQ ID NO: 6116.

[0741] In some embodiments, the antigen binding domain that targets NKp30 comprises a VL comprising a VLFWR1 amino acid sequence of SEQ ID NO: 6113 (or a sequence with no more than 1, 2, or 3 mutations, e.g., substitutions, additions, or deletions), a VLFWR2 amino acid sequence of SEQ ID NO: 6114 (or a sequence with no more than 1 mutation, e.g., substitution, addition, or deletion), a VLFWR3 amino acid sequence of SEQ ID NO: 6115 (or a sequence with no more than 1 mutation, e.g., substitution, addition, or deletion), and/or a VLFWR4 amino acid sequence of SEQ ID NO: 6116.

[0742] In some embodiments, the antigen binding domain that targets NKp30 comprises a VH comprising a heavy chain framework region 1 (VHFWR1) amino acid sequence of SEQ ID NO: 6059, a VHFWR2 amino acid sequence of SEQ ID NO: 6060, a VHFWR3 amino acid sequence of SEQ ID NO: 6061, and/or a VHFWR4 amino acid sequence of SEQ ID NO: 6062.

[0743] In some embodiments, the antigen binding domain that targets NKp30 comprises a VH comprising a VHFWR1 amino acid sequence of SEQ ID NO: 6059 (or a sequence with no more than 1, 2, 3, 4, 5, or 6 mutations, e.g., substitutions, additions, or deletions, therefrom), a VHFWR2 amino acid sequence of SEQ ID NO: 6060 (or a sequence with no more than 1, 2, 3, 4, 5, or 6 mutations, e.g., substitutions, additions, or deletions, therefrom), a VHFWR3 amino acid sequence of SEQ ID NO: 6061 (or a sequence with no more than 1, 2, 3, 4, 5, 6, 7, 8, 9, 10, or 11 mutations, e.g., substitutions, additions, or deletions), and/or a VHFWR4 amino acid sequence of SEQ ID NO: 6062.

[0744] In some embodiments, the antigen binding domain that targets NKp30 comprises a VL comprising a light chain framework region 1 (VLFWR1) amino acid sequence of SEQ ID NO: 6117, a VLFWR2 amino acid sequence of SEQ ID NO: 6118, a VLFWR3 amino acid sequence of SEQ ID NO: 6119, and/or a VLFWR4 amino acid sequence of SEQ ID NO: 6120.

[0745] In some embodiments, the antigen binding domain that targets NKp30 comprises a VL comprising a VLFWR1 amino acid sequence of SEQ ID NO: 6117 (or a sequence with no more than 1, 2, or 3 mutations, e.g., substitutions, additions, or deletions), a VLFWR2 amino acid sequence of SEQ ID NO: 6118 (or a sequence with no more than 1 mutation, e.g., substitution, addition, or deletion), a VLFWR3 amino acid sequence of SEQ ID NO: 6119 (or a sequence with no more than 1 mutation, e.g., substitution, addition, or deletion), and/or a VLFWR4 amino acid sequence of SEQ ID NO: 6120.

[0746] In some embodiments, the antigen binding domain that targets NKp30 comprises a VH comprising the amino acid sequence of SEQ ID NO: 6148 (or an amino acid sequence having at least about 77%, 80%, 85%, 90%, 95%, or 99% sequence identity to SEQ ID NO: 6148). In some embodiments, the antigen binding domain that targets NKp30 comprises a VH comprising the amino acid sequence of SEQ ID NO: 6149 (or an amino acid sequence having at least about 77%, 80%, 85%, 90%, 95%, or 99% sequence identity to SEQ ID NO: 6149). In some embodiments, the antigen binding domain that targets NKp30 comprises a VL comprising the amino acid sequence of SEQ ID NO: 6150 (or an amino acid sequence having at least about 93%, 95%, or 99% sequence identity to SEQ ID NO: 6150). In some embodiments, antigen binding domain that targets NKp30 comprises a VH comprising the amino acid sequence of SEQ ID NO: 6148. In some embodiments, antigen binding domain that targets NKp30 comprises a VH comprising the amino acid sequence of SEQ ID NO: 6149. In some embodiments, the antigen binding domain that targets NKp30 comprises a VL comprising the amino acid sequence of SEQ ID NO: 6150.

[0747] In some embodiments, the antigen binding domain that targets NKp30 comprises a VH comprising the amino acid sequence of SEQ ID NO: 6148, and a VL comprising the amino acid sequence of SEQ ID NO: 6150. In some embodiments, the antigen binding domain that targets NKp30 comprises a VH comprising the amino acid sequence of SEQ ID NO: 6149, and a VL comprising the amino acid sequence of SEQ ID NO: 6150.

[0748] In some embodiments, the antigen binding domain that targets NKp30 comprises a VH comprising the amino acid sequence of SEQ ID NO: 6151 (or an amino acid sequence having at least about 77%, 80%, 85%, 90%, 95%, or 99% sequence identity to SEQ ID NO: 6151). In some embodiments, the antigen binding domain that targets NKp30 comprises a VH comprising the amino acid sequence of SEQ ID NO: 6152 (or an amino acid sequence having at least about 77%, 80%, 85%, 90%, 95%, or 99% sequence identity to SEQ ID NO: 6152). In some embodiments, the antigen binding domain that targets NKp30 comprises a VL comprising the amino acid sequence of SEQ ID NO: 6153 (or an amino acid sequence having at least about 93%, 95%, or 99% sequence identity to SEQ ID NO: 6153). In some embodiments, antigen binding domain that targets NKp30 comprises a VH comprising the amino acid sequence of SEQ ID NO: 6151. In some embodiments, antigen binding domain that targets NKp30 comprises a VH comprising the amino acid sequence of SEQ ID NO: 6152. In some embodiments, the antigen binding domain that targets NKp30 comprises a VL comprising the amino acid sequence of SEQ ID NO: 6153.

[0749] In some embodiments, the antigen binding domain that targets NKp30 comprises a VH comprising the amino acid sequence of SEQ ID NO: 6151, and a VL comprising the amino acid sequence of SEQ ID NO: 6153. In some embodiments, the antigen binding domain that targets NKp30 comprises a VH comprising the amino acid sequence of SEQ ID NO: 6152, and a VL comprising the amino acid sequence of SEQ ID NO: 6153.

[0750] In some embodiments, the antigen binding domain that targets NKp30 comprises an scFv. In some embodiments, the scFv comprises an amino acid sequence selected from SEQ ID NOs: 6187-6190, or an amino acid sequence having at least about 93%, 95%, or 99% sequence identity thereto.

TABLE 7
Exemplary heavy chain CDRs and FWRs of NKp30-targeting antigen binding domains

| Ab ID | VHFWR1 | VHCDR1 | VHFWR2 | VHCDR2 | VHFWR3 | VHCDR3 | VHFWR4 |
|---|---|---|---|---|---|---|---|
| 9G1- | QIQLQES | TGGYH | WIRQFP | YIYSSGS | RISITRDTS | GNWHY | WGQGT |
| HC | GPGLVKP | WN | GKKLE | TSYNPSL | KNQFFLQ | FDF (SEQ | MVTVSS |
| | SQSLSLT | (SEQ ID | WMG | KS (SEQ | LNSVTTE | ID NO: | (SEQ ID |
| | CSVTGFSI | NO: | (SEQ ID | ID NO: | DTATYYC | 6002) | NO: |
| | N (SEQ ID | 6000) | NO: | 6001) | AR (SEQ | | 6006) |
| | NO: 6003) | | 6004) | | ID NO: | | |
| | | | | | 6005) | | |
| 15H6- | QIQLQES | TGGYH | WIRQFP | YIYSSGT | RISITRDTS | GNWHY | WGQGT |
| HC | GPGLVKP | WN | GKKLE | TRYNPS | KNQFFLQ | FDY | LVAVSS |
| | SQSLSLT | (SEQ ID | WMG | LKS | LNSVTPED | (SEQ ID | (SEQ ID |
| | CSVTGFSI | NO: | (SEQ ID | (SEQ ID | TATYYCT | NO: 6009) | NO: |
| | N (SEQ ID | 6007) | NO: | NO: 6008) | R (SEQ ID | | 6013) |
| | NO: 6010) | | 6011) | | NO: 6012) | | |
| 9G1- | QIQLQES | TGGYH | WIRQPA | YIYSSGS | RVTMSRD | GNWHY | WGQGT |
| HC_1 | GPGLVKP | WN | GKGLE | TSYNPSL | TSKNQFSL | FDF (SEQ | MVTVSS |
| | SETLSLT | (SEQ ID | WIG | KS (SEQ | KLSSVTA | ID NO: | (SEQ ID |
| | CTVSGFSI | NO: | (SEQ ID | ID NO: | ADTAVYY | 6002) | NO: |
| | N (SEQ ID | 6000) | NO: | 6001) | CAR (SEQ | | 6017) |
| | NO: 6014) | | 6015) | | ID NO: | | |
| | | | | | 6016) | | |
| 9G1- | QIQLQES | TGGYH | WIRQHP | YIYSSGS | LVTISRDT | GNWHY | WGQGT |
| HC_2 | GPGLVKP | WN | GKGLE | TSYNPSL | SKNQFSL | FDF (SEQ | MVTVSS |
| | SQTLSLT | (SEQ ID | WIG | KS (SEQ | KLSSVTA | ID NO: | (SEQ ID |
| | CTVSGFSI | NO: | (SEQ ID | ID NO: | ADTAVYY | 6002) | NO: |
| | N (SEQ ID | 6000) | NO: | 6001) | CAR (SEQ | | 6021) |
| | NO: 6018) | | 6019) | | ID NO: | | |
| 9G1- | EIQLLES | TGGYH | WVRQA | YIYSSGS | RFTISRDT | GNWHY | WGQGT |
| HC_3 | GGGLVQ | WN | PGKGLE | TSYNPSL | SKNTFYL | FDF (SEQ | MVTVSS |
| | PGGSLRL | (SEQ ID | WVG | KS (SEQ | QMNSLRA | ID NO: | (SEQ ID |
| | SCAVSGF | NO: | (SEQ ID | ID NO: | EDTAVYY | 6002) | NO: |
| | SIN (SEQ | 6000) | NO: | 6001) | CAR (SEQ | | 6025) |
| | ID NO: | | 6023) | | ID NO: | | |
| | 6022) | | | | 6024) | | |
| 9G1- | QIQLVQS | TGGYH | WVRQA | YIYSSGS | RVTITRDT | GNWHY | WGQGT |
| HC_4 | GAEVKK | WN | PGQGLE | TSYNPSL | STNTFYM | FDF (SEQ | MVTVSS |
| | PGSSVKV | (SEQ ID | WMG | KS (SEQ | ELSSLRSE | ID NO: | (SEQ ID |
| | SCKVSGF | NO: | (SEQ ID | ID NO: | DTAVYYC | 6002) | NO: |
| | SIN (SEQ | 6000) | NO | 6001) | AR (SEQ | | 6029) |
| | ID NO: | | 6027) | | ID NO: | | |
| | 6026) | | | | 6028) | | |
| 9G1- | EIQLVES | TGGYH | WVRQA | YIYSSGS | RFTISRDT | GNWHY | WGQGT |
| HC_5 | GGGLVQ | WN | PGKGLE | TSYNPSL | AKNSFYL | FDF (SEQ | MVTVSS |
| | PGGSLRL | (SEQ ID | WVG | KS (SEQ | QMNSLRA | ID NO: | (SEQ ID |
| | SCAVSGF | NO: | (SEQ ID | ID NO: | EDTAVYY | 6002) | NO |
| | SIN (SEQ | 6000) | NO: | 6001) | CAR (SEQ | | 6034) |
| | ID NO: | | 6032) | | ID NO: | | |
| | 6030) | | | | 6033) | | |
| 9G1- | QIQLVQS | TGGYH | WVRQA | YIYSSGS | RVTMTRD | GNWHY | WGQGT |
| HC_6 | GAEVKK | WN | PGQGLE | TSYNPSL | TSTNTFY | FDF (SEQ | MVTVSS |
| | PGASVKV | (SEQ ID | WMG | KS (SEQ | MELSSLRS | ID NO: | (SEQ ID |
| | SCKVSGF | NO: | (SEQ ID | ID NO: | EDTAVYY | 6002) | NO: |
| | SIN (SEQ | 6000) | NO: | 6001) | CAR (SEQ | | 6038) |
| | ID NO: | | 6036) | | ID NO: | | |
| | 6035) | | | | 6037) | | |
| 15H6- | QIQLQES | TGGYH | WIRQHP | YIYSSGT | LVTISRDT | GNWHY | WGQGT |
| HC_1 | GPGLVKP | WN | GKGLE | TRYNPS | SKNQFSL | FDY | LVTVSS |
| | SQTLSLT | (SEQ ID | WIG | LKS | KLSSVTA | (SEQ ID | (SEQ ID |
| | CTVSGFSI | NO: | (SEQ ID | (SEQ ID | ADTAVYY | NO: 6009) | NO: |
| | N (SEQ ID | 6007) | NO: | NO: 6008) | CAR (SEQ | | 6042) |
| | NO: 6039) | | 6040) | | ID NO: | | |
| | | | | | 6041) | | |
| 15H6- | QIQLQES | TGGYH | WIRQPA | YIYSSGT | RVTMSRD | GNWHY | WGQGT |
| HC_2 | GPGLVKP | WN | GKGLE | TRYNPS | TSKNQFSL | FDY | LVTVSS |
| | SETLSLT | (SEQ ID | WIG | LKS | KLSSVTA | (SEQ ID | (SEQ ID |
| | CTVSGFSI | NO: | (SEQ ID | (SEQ ID | ADTAVYY | NO: 6009) | NO |
| | N (SEQ ID | 6007) | NO: | NO: 6008) | CAR (SEQ | | 6046) |
| | NO: 6043) | | 6044) | | ID NO: | | |
| | | | | | 6045) | | |
| 15H6- | EIQLLES | TGGYH | WVRQA | YIYSSGT | RFTISRDT | GNWHY | WGQGT |
| HC_3 | GGGLVQ | WN | PGKGLE | TRYNPS | SKNTFYL | FDY | LVTVSS |
| | PGGSLRL | (SEQ ID | WVG | LKS | QMNSLRA | (SEQ ID | (SEQ ID |
| | SCAVSGF | NO: | (SEQ ID | (SEQ ID | EDTAVYY | NO: 6009) | NO: |
| | SIN (SEQ | 6007) | NO | NO: 6008) | CAR (SEQ | | 6050) |
| | ID NO: | | 6048) | | ID NO: | | |
| | 6047) | | | | 6049) | | |
| 15H6- | QIQLVES | TGGYH | WIRQAP | YIYSSGT | RFTISRDT | GNWHY | WGQGT |
| HC_4 | GGGLVK | WN | GKGLE | TRYNPS | AKNSFYL | FDY | LVTVSS |
| | PGGSLRL | (SEQ ID | WVG | LKS | QMNSLRA | (SEQ ID | (SEQ ID |
| | SCAVSGF | NO: | (SEQ ID | (SEQ ID | EDTAVYY | NO: 6009) | NO: |
| | SIN (SEQ | 6007) | NO: | NO: 6008) | CAR (SEQ | | 6054) |
| | ID NO: | | 6052) | | ID NO: | | |
| | 6051) | | | | 6053) | | |
| 15H6- | QIQLVQS | TGGYH | WVRQA | YIYSSGT | RVTMTRD | GNWHY | WGQGT |
| HC_5 | GAEVKK | WN | PGQGLE | TRYNPS | TSTNTFY | FDY | LVTVSS |
| | PGASVKV | (SEQ ID | WMG | LKS | MELSSLRS | (SEQ ID | (SEQ ID |
| | SCKVSGF | NO: | (SEQ ID | (SEQ ID | EDTAVYY | NO: 6009) | NO: |
| | SIN (SEQ | 6007) | NO: | NO: 6008) | CAR (SEQ | | 6058) |
| | ID NO: | | 6056) | | ID NO: | | |
| | 6055) | | | | 6057) | | |
| 15H6- | EIQLVQS | TGGYH | WVQQA | YIYSSGT | RVTITRDT | GNWHY | WGQGT |
| HC_6 | GAEVKK | WN | PGKGLE | TRYNPS | STNTFYM | FDY | LVTVSS |
| | PGATVKI | (SEQ ID | WMG | LKS | ELSSLRSE | (SEQ ID | (SEQ ID |
| | SCKVSGF | NO: | (SEQ ID | (SEQ ID | DTAVYYC | NO: 6009) | NO: |
| | SIN (SEQ | 6007) | NO: | NO: 6008) | AR (SEQ | | 6062) |
| | ID NO: | | 6060) | | ID NO: | | |
| | 6059) | | | | 6061) | | |

TABLE 34
Exemplary heavy chain CDRs and FWRs of NKp30-targeting antigen binding domains
(according to the Kabat numbering scheme)

| Ab ID | VHFWR1 | VHCDR1 | VHFWR2 | VHCDR2 | VHFWR3 | VHCDR3 | VHFWR4 |
|---|---|---|---|---|---|---|---|
| 9G1-HC | QIQLQE | GYHWN | WIRQFP | YIYSSGS | RISITRD | GNWHY | WGQGT |
| | SGPGLV | (SEQ ID | GKKLE | TSYNPS | TSKNQF | FDF | MVTVSS |
| | KPSQSL | NO: | WMG | LKS | FLQLNS | (SEQ ID | (SEQ ID |
| | SLTCSV | 7313) | (SEQ ID | (SEQ ID | VTTEDT | NO: | NO: |
| | TGFSINT | | NO: | NO: | ATYYCA | 6002) | 6006) |
| | G (SEQ | | 6004) | 6001) | R (SEQ | | |
| | ID NO: | | | | ID NO: | | |
| | 7317) | | | | 6005) | | |
| 15H6-HC | QIQLQE | GYHWN | WIRQFP | YIYSSG | RISITRD | GNWHY | WGQGT |
| | SGPGLV | (SEQ ID | GKKLE | TTRYNP | TSKNQF | FDY | LVAVSS |
| | KPSQSL | NO: | WMG | SLKS | FLQLNS | (SEQ ID | (SEQ ID |
| | SLTCSV | 7313) | (SEQ ID | (SEQ ID | VTPEDT | NO: | NO: |
| | TGFSINT | | NO: | NO: | ATYYCT | 6009) | 6013) |
| | G (SEQ | | 6011) | 6008) | R (SEQ | | |
| | ID NO: | | | | ID NO: | | |
| | 7317) | | | | 6012) | | |
| 9G1-HC_1 | QIQLQE | GYHWN | WIRQPA | YIYSSGS | RVTMSR | GNWHY | WGQGT |
| | SGPGLV | (SEQ ID | GKGLE | TSYNPS | DTSKNQ | FDF | MVTVSS |
| | KPSETL | NO: | WIG | LKS | FSLKLSS | (SEQ ID | (SEQ ID |
| | SLTCTV | 7313) | (SEQ ID | (SEQ ID | VTAADT | NO: | NO: |
| | SGFSINT | | NO: | NO: | AVYYC | 6002) | 6017) |
| | G (SEQ | | 6015) | 6001) | AR (SEQ | | |
| | ID NO: | | | | ID NO: | | |
| | 7371) | | | | 6016) | | |
| 9G1-HC_2 | QIQLQE | GYHWN | WIRQHP | YIYSSGS | LVTISR | GNWHY | WGQGT |
| | SGPGLV | (SEQ ID | GKGLE | TSYNPS | DTSKNQ | FDF | MVTVSS |
| | KPSQTL | NO: | WIG | LKS | FSLKLSS | (SEQ ID | (SEQ ID |
| | SLTCTV | 7313) | (SEQ ID | (SEQ ID | VTAADT | NO: | NO: |
| | SGFSINT | | NO: | NO: | AVYYC | 6002) | 6021) |
| | G (SEQ | | 6019) | 6001) | AR (SEQ | | |
| | ID NO: | | | | ID NO: | | |
| | 7372) | | | | 6020) | | |
| 9G1-HC_3 | EIQLLES | GYHWN | WVRQA | YIYSSGS | RFTISRD | GNWHY | WGQGT |
| | GGGLV | (SEQ ID | PGKGLE | TSYNPS | TSKNTF | FDF | MVTVSS |
| | QPGGSL | NO: | WVG | LKS | YLQMN | (SEQ ID | (SEQ ID |
| | RLSCAV | 7313) | (SEQ ID | (SEQ ID | SLRAED | NO: | NO: |
| | SGFSINT | | NO: | NO: | TAVYYC | 6002) | 6025) |
| | G (SEQ | | 6023) | 6001) | AR (SEQ | | |
| | ID NO: | | | | ID NO: | | |
| | 7373) | | | | 6024) | | |
| 9G1-HC_4 | QIQLVQ | GYHWN | WVRQA | YIYSSGS | RVTITR | GNWHY | WGQGT |
| | SGAEVK | (SEQ ID | PGQGLE | TSYNPS | DTSTNT | FDF | MVTVSS |
| | KPGSSV | NO: | WMG | LKS | FYMELS | (SEQ ID | (SEQ ID |
| | KVSCKV | 7313) | (SEQ ID | (SEQ ID | SLRSED | NO: | NO: |
| | SGFSINT | | NO: | NO: | TAVYYC | 6002) | 6029) |
| | G (SEQ | | 6027) | 6001) | AR (SEQ | | |
| | ID NO: | | | | ID NO: | | |
| | 7374) | | | | 6028) | | |
| 9G1-HC_5 | EIQLVES | GYHWN | WVRQA | YIYSSGS | RFTISRD | GNWHY | WGQGT |
| | GGGLV | (SEQ ID | PGKGLE | TSYNPS | TAKNSF | FDF | MVTVSS |
| | QPGGSL | NO: | WVG | LKS | YLQMN | (SEQ ID | (SEQ ID |
| | RLSCAV | 7313) | (SEQ ID | (SEQ ID | SLRAED | NO: | NO: |
| | SGFSINT | | NO: | NO: | TAVYYC | 6002) | 6034) |
| | G (SEQ | | 6032) | 6001) | AR (SEQ | | |
| | ID NO: | | | | ID NO: | | |
| | 7375) | | | | 6033) | | |
| 9G1-HC_6 | QIQLVQ | GYHWN | WVRQA | YIYSSGS | RVTMTR | GNWHY | WGQGT |
| | SGAEVK | (SEQ ID | PGQGLE | TSYNPS | DTSTNT | FDF | MVTVSS |
| | KPGASV | NO: | WMG | LKS | FYMELS | (SEQ ID | (SEQ ID |
| | KVSCKV | 7313) | (SEQ ID | (SEQ ID | SLRSED | NO: | NO: |
| | SGFSINT | | NO: | NO: | TAVYYC | 6002) | 6038) |
| | G (SEQ | | 6036) | 6001) | AR (SEQ | | |
| | ID NO: | | | | ID NO: | | |
| | 7376) | | | | 6037) | | |
| 15H6- | QIQLQE | GYHWN | WIRQHP | YIYSSG | LVTISR | GNWHY | WGQGT |
| HC_1 | SGPGLV | (SEQ ID | GKGLE | TTRYNP | DTSKNQ | FDY | LVTVSS |
| | KPSQTL | NO: | WIG | SLKS | FSLKLSS | (SEQ ID | (SEQ ID |
| | SLTCTV | 7313) | (SEQ ID | (SEQ ID | VTAADT | NO: | NO: |
| | SGFSINT | | NO: | NO: | AVYYC | 6009) | 6042) |
| | G (SEQ | | 6040) | 6008) | AR (SEQ | | |
| | ID NO: | | | | ID NO: | | |
| | 7372) | | | | 6041) | | |
| 15H6- | QIQLQE | GYHWN | WIRQPA | YIYSSG | RVTMSR | GNWHY | WGQGT |
| HC_2 | SGPGLV | (SEQ ID | GKGLE | TTRYNP | DTSKNQ | FDY | LVTVSS |
| | KPSETL | NO: | WIG | SLKS | FSLKLSS | (SEQ ID | (SEQ ID |
| | SLTCTV | 7313) | (SEQ ID | (SEQ ID | VTAADT | NO: | NO: |
| | SGFSINT | | NO: | NO: | AVYYC | 6009) | 6046) |
| | G (SEQ | | 6044) | 6008) | AR (SEQ | | |
| | ID NO: | | | | ID NO: | | |
| | 7371) | | | | 6045) | | |
| 15H6- | EIQLLES | GYHWN | WVRQA | YIYSSG | RFTISRD | GNWHY | WGQGT |
| HC_3 | GGGLV | (SEQ ID | PGKGLE | TTRYNP | TSKNTF | FDY | LVTVSS |
| | QPGGSL | NO: | WVG | SLKS | YLQMN | (SEQ ID | (SEQ ID |
| | RLSCAV | 7313) | (SEQ ID | (SEQ ID | SLRAED | NO: | NO: |
| | SGFSINT | | NO: | NO | TAVYYC | 6009) | 6050) |
| | G (SEQ | | 6048) | 6008) | AR (SEQ | | |
| | ID NO: | | | | ID NO: | | |
| | 7373) | | | | 6049) | | |
| 15H6- | QIQLVE | GYHWN | WIRQAP | YIYSSG | RFTISRD | GNWHY | WGQGT |
| HC_4 | SGGGLV | (SEQ ID | GKGLE | TTRYNP | TAKNSF | FDY | LVTVSS |
| | KPGGSL | NO: | WVG | SLKS | YLQMN | (SEQ ID | (SEQ ID |
| | RLSCAV | 7313) | (SEQ ID | (SEQ ID | SLRAED | NO: | NO: |
| | SGFSINT | | NO: | NO: | TAVYYC | 6009) | 6054) |
| | G (SEQ | | 6052) | 6008) | AR (SEQ | | |
| | ID NO: | | | | ID NO: | | |
| | 7377) | | | | 6053) | | |
| 15H6- | QIQLVQ | GYHWN | WVRQA | YIYSSG | RVTMTR | GNWHY | WGQGT |
| HC_5 | SGAEVK | (SEQ ID | PGQGLE | TTRYNP | DTSTNT | FDY | LVTVSS |
| | KPGASV | NO: | WMG | SLKS | FYMELS | (SEQ ID | (SEQ ID |
| | KVSCKV | 7313) | (SEQ ID | (SEQ ID | SLRSED | NO: | NO: |
| | SGFSINT | | NO: | NO: | TAVYYC | 6009) | 6058) |
| | G (SEQ | | 6056) | 6008) | AR (SEQ | | |
| | ID NO: | | | | ID NO: | | |
| | 7376) | | | | 6057) | | |
| 15H6- | EIQLVQ | GYHWN | WVQQA | YIYSSG | RVTITR | GNWHY | WGQGT |
| HC_6 | SGAEVK | (SEQ ID | PGKGLE | TTRYNP | DTSTNT | FDY | LVTVSS |
| | KPGATV | NO: | WMG | SLKS | FYMELS | (SEQ ID | (SEQ ID |
| | KISCKV | 7313) | (SEQ ID | (SEQ ID | SLRSED | NO: | NO: |
| | SGFSINT | | NO: | NO: | TAVYYC | 6009) | 6062) |
| | G (SEQ | | 6060) | 6008) | AR (SEQ | | |
| | ID NO: | | | | ID NO: | | |
| | 7378) | | | | 6061) | | |
| 9D9-HC | QIQLQE | GYHWN | WIRQFP | YIYSSG | RISITRD | GDWHY | WGQGT |
| | SGPGLV | (SEQ ID | GKKVE | TTKYNP | TSKNQF | FDY | MVAVSS |
| | KPSQSL | NO: | WMG | SLKS | FLQLNS | (SEQ ID | (SEQ ID |
| | SLSCSV | 7313) | (SEQ ID | (SEQ ID | VTTEDT | NO: | NO: |
| | TGFSINT | | NO: | NO: | ATYYCA | 7315) | 7316) |
| | G (SEQ | | 7314) | 7385) | R (SEQ | | |
| | ID NO: | | | | ID NO: | | |
| | 7312) | | | | 6005) | | |
| 3A12-HC | QIQLQE | GYHWN | WIRQFP | YIYSSGS | RFSITRD | GNWHY | WGQGT |
| | SGPGLV | (SEQ ID | GKKLE | TRYNPS | TSKNQF | FDY | LVAVSS |
| | KPSQSL | NO: | WMG | LKS | FLQLNS | (SEQ ID | (SEQ ID |
| | SLTCSV | 7313) | (SEQ ID | (SEQ ID | VTTEDT | NO: | NO: |
| | TGFSINT | | NO: | NO: | ATYYCT | 6009) | 6013) |
| | G (SEQ | | 6004) | 7318) | R (SEQ | | |
| | ID NO: | | | | ID NO: | | |
| | 7317) | | | | 7319) | | |
| 12D10-HC | QIQLQE | GYHWN | WIRQFP | YIYSSG | RISITRD | GNWHY | WGQGT |
| | SGPGLV | (SEQ ID | GKKLE | TTRYNP | TSKNQF | FDY | LVAVSS |
| | KPSQSL | NO: | WMG | SLKS | FLQLNS | (SEQ ID | (SEQ ID |
| | SLTCSV | 7313) | (SEQ ID | (SEQ ID | VTPEDT | NO: | NO: |
| | TGFSINT | | NO: | NO: | ATYYCT | 6009) | 6013) |
| | G (SEQ | | 6004) | 6008) | R (SEQ | | |
| | ID NO: | | | | ID NO: | | |
| | 7317) | | | | 6012) | | |
| 15E1-HC | QIQLQE | GYHWN | WIRQFP | YIYSSGS | RFSITRD | GDWHY | WGPGT |
| | SGPGLV | (SEQ ID | GKKLE | TSYNPS | TSKNQF | FDY | MVTVSS |
| | KPSQSL | NO: | WMG | LKS | FLQLNS | (SEQ ID | (SEQ ID |
| | SLSCSV | 7313) | (SEQ ID | (SEQ ID | VTTEDT | NO: | NO: |
| | TGFSITT | | NO: | NO: | ATYYCA | 7315) | 7324) |
| | T (SEQ | | 6004) | 6001) | R (SEQ | | |
| | ID NO: | | | | ID NO: | | |
| | 7322) | | | | 7323) | | |
| 15E1 | QIQLQE | GYHWN | WIRQHP | YIYSSGS | LVTISR | GDWHY | WGQGT |
| Humanized | SGPGLV | (SEQ ID | GKGLE | TSYNPS | DTSKNQ | FDY | MVTVSS |
| variant_VH | KPSQTL | NO: | WIG | LKS | FSLKLSS | (SEQ ID | (SEQ ID |
| 1 | SLTCTV | 7313) | (SEQ ID | (SEQ ID | VTAADT | NO: | NO: |
| | SGFSITT | | NO: | NO: | AVYYC | 7315) | 6006) |
| | T (SEQ | | 6019) | 6001) | AR (SEQ | | |
| | ID NO: | | | | ID NO: | | |
| | 7330) | | | | 6020) | | |
| 15E1 | QIQLVE | GYHWN | WIRQAP | YIYSSGS | RFTISRD | GDWHY | WGQGT |
| Humanized | SGGGLV | (SEQ ID | GKGLE | TSYNPS | TAKNSF | FDY | MVTVSS |
| variant_VH | KPGGSL | NO: | WVG | LKS | YLQMN | (SEQ ID | (SEQ ID |
| 2 | RLSCAV | 7313) | (SEQ ID | (SEQ ID | SLRAED | NO: | NO: |
| | SGFSITT | | NO: | NO: | TAVYYC | 7315) | 6006) |
| | T (SEQ | | 6052) | 6001) | AR (SEQ | | |
| | ID NO: | | | | ID NO: | | |
| | 7331) | | | | 6033) | | |
| 15E1 | EIQLLES | GYHWN | WVRQA | YIYSSGS | RFTISRD | GDWHY | WGQGT |
| Humanized | GGGLV | (SEQ ID | PGKGLE | TSYNPS | TSKNTF | FDY | MVTVSS |
| variant_VH | QPGGSL | NO: | WVG | LKS | YLQMN | (SEQ ID | (SEQ ID |
| 3 | RLSCAV | 7313) | (SEQ ID | (SEQ ID | SLRAED | NO: | NO: |
| | SGFSITT | | NO: | NO: | TAVYYC | 7315) | 6006) |
| | T (SEQ | | 6023) | 6001) | AR (SEQ | | |
| | ID NO: | | | | ID NO: | | |
| | 7332) | | | | 6024) | | |
| 15E1 | EIQLVES | GYHWN | WVRQA | YIYSSGS | RFTISRD | GDWHY | WGQGT |
| Humanized | GGGLV | (SEQ ID | PGKGLE | TSYNPS | TAKNSF | FDY | MVTVSS |
| variant_VH | QPGGSL | NO: | WVG | LKS | YLQMN | (SEQ ID | (SEQ ID |
| 4 | RLSCAV | 7313) | (SEQ ID | (SEQ ID | SLRAED | NO: | NO: |
| | SGFSITT | | NO: | NO: | TAVYYC | 7315) | 6006) |
| | T (SEQ | | 6023) | 6001) | AR (SEQ | | |
| | ID NO: | | | | ID NO: | | |
| | 7333) | | | | 6033) | | |
| 15E1 | QIQLVQ | GYHWN | WVRQA | YIYSSGS | RVTMTR | GDWHY | WGQGT |
| Humanized | SGAEVK | (SEQ ID | PGQGLE | TSYNPS | DTSTNT | FDY | MVTVSS |
| variant_VH | KPGASV | NO: | WMG | LKS | FYMELS | (SEQ ID | (SEQ ID |
| 5 | KVSCKV | 7313) | (SEQ ID | (SEQ ID | SLRSED | NO: | NO: |
| | SGFSITT | | NO: | NO: | TAVYYC | 7315) | 6006) |
| | T (SEQ | | 6027) | 6001) | AR (SEQ | | |
| | ID NO: | | | | ID NO: | | |
| | 7334) | | | | 6037) | | |

TABLE 8
Exemplary light chain CDRs and FWRs of NKp30-targeting antigen binding domains

| Ab ID | VLFWR1 | VLCDR1 | VLFWR2 | VLCDR2 | VLFWR3 | VLCDR3 | VLFWR4 |
|---|---|---|---|---|---|---|---|
| 9G1-LC | SYTLTQ | SGERLS | WYQQK | ENDKRP | GIPDQFS | QSWDST | FGSGTQ |
| | PPLLSV | DKYVH | PGRAPV | S (SEQ | GSNSGN | NSAV | LTVL |
| | ALGHK | (SEQ ID | MVIY | ID NO: | IATLTIS | (SEQ ID | (SEQ ID |
| | ATITC | NO: | (SEQ ID | 6064) | KAQAG | NO: | NO: |
| | (SEQ ID | 6063) | NO: | | YEADY | 7293) | 6069) |
| | NO: | | 6067) | | YC (SEQ | | |
| | 6066) | | | | ID NO: | | |
| | | | | | 7292) | | |
| 15H6-LC | SYTLTQ | SGENLS | WYQQK | ENEKRP | GIPDQFS | HYWESI | FGSGTH |
| | PPSLSV | DKYVH | PGRAPV | S (SEQ | GSNSGN | NSVV | LTVL |
| | APGQKA | (SEQ ID | MVIY | ID NO: | IATLTIS | (SEQ ID | (SEQ ID |
| | TIIC | NO: | (SEQ ID | 6071) | KAQPGS | NO: | NO: |
| | (SEQ ID | 6070) | NO: | | EADYYC | 6072) | 6076) |
| | NO: | | 6074) | | (SEQ ID | | |
| | 6073) | | | | NO: | | |
| | | | | | 6075) | | |
| 9G1-LC_1 | QSVTTQ | SGERLS | WYQQL | ENDKRP | GVPDRF | QSWDST | FGGGTQ |
| | PPSVSG | DKYVH | PGTAPK | S (SEQ | SGSNSG | NSAV | LTVL |
| | APGQRV | (SEQ ID | MLIY | ID NO: | NSASLA | (SEQ ID | (SEQ ID |
| | TISC | NO: | (SEQ ID | 6064) | ITGLQA | NO: | NO: |
| | (SEQ ID | 6063) | NO: | | EDEADY | 7293) | 6080) |
| | NO: | | 6078) | | YC (SEQ | | |
| | 6077) | | | | ID NO: | | |
| | | | | | 6079) | | |
| 9G1-LC_2 | QSVTTQ | SGERLS | WYQQL | ENDKRP | GVPDRF | QSWDST | FGGGTQ |
| | PPSASG | DKYVH | PGTAPK | S (SEQ | SGSNSG | NSAV | LTVL |
| | TPGQRV | (SEQ ID | MLIY | ID NO: | NSASLA | (SEQ ID | (SEQ ID |
| | TISC | NO: | (SEQ ID | 6064) | ISGLQSE | NO: | NO: |
| | (SEQ ID | 6063) | NO | | DEADY | 7293) | 6084) |
| | NO: | | 6082) | | YC (SEQ | | |
| | 6081) | | | | ID NO: | | |
| | | | | | 6083) | | |
| 9G1-LC_3 | QSVTTQ | SGERLS | WYQQL | ENDKRP | GVPDRF | QSWDST | FGGGTQ |
| | PPSASG | DKYVH | PGTAPK | S (SEQ | SGSNSG | NSAV | LTVL |
| | TPGQRV | (SEQ ID | MLIY | ID NO: | NSASLA | (SEQ ID | (SEQ ID |
| | TISC | NO: | (SEQ ID | 6064) | ISGLRSE | NO | NO: |
| | (SEQ ID | 6063) | NO: | | DEADY | 7293) | 6088) |
| | NO: | | 6086) | | YC (SEQ | | |
| | 6085) | | | | ID NO: | | |
| | | | | | 6087) | | |
| 9G1-LC 4 | SSETTQ | SGERLS | WYQQK | ENDKRP | GIPERFS | QSWDST | FGGGTQ |
| | PHSVSV | DKYVH | PGQDPV | S (SEQ | GSNPGN | NSAV | LTVL |
| | ATAQM | (SEQ ID | MVIY | ID NO: | TATLTIS | (SEQ ID | (SEQ ID |
| | ARITC | NO: | (SEQ ID | 6064) | RIEAGD | NO: | NO: |
| | (SEQ ID | 6063) | NO: | | EADYYC | 7293) | 6092) |
| | NO: | | 6090) | | (SEQ ID | | |
| | 6089) | | | | NO: | | |
| | | | | | 6091) | | |
| 9G1-LC_5 | DIQMTQ | SGERLS | WYQQK | ENDKRP | GVPSRF | QSWDST | FGQGTK |
| | SPSTLSA | DKYVH | PGKAPK | S (SEQ | SGSNSG | NSAV | VEIK |
| | SVGDRV | (SEQ ID | MLIY | ID NO: | NEATLT | (SEQ ID | (SEQ ID |
| | TITC | NO: | (SEQ ID | 6064) | ISSLQPD | NO: | NO: |
| | (SEQ ID | 6063) | NO: | | DFATYY | 7293) | 6096) |
| | NO: | | 6094) | | C (SEQ | | |
| | 6093) | | | | ID NO: | | |
| | | | | | 6095) | | |
| 15H6- | QYVLTQ | SGENLS | WYQQL | ENEKRP | GVPDRF | HYWESI | FGEGTE |
| LC_1 | PPSASG | DKYVH | PGTAPK | S (SEQ | SGSNSG | NSVV | LTVL |
| | TPGQRV | (SEQ ID | MLIY | ID NO: | NSASLA | (SEQ ID | (SEQ ID |
| | TISC | NO: | (SEQ ID | 6071) | ISGLQSE | NO: | NO: |
| | (SEQ ID | 6070) | NO: | | DEADY | 6072) | 6100) |
| | NO: | | 6098) | | YC (SEQ | | |
| | 6097) | | | | ID NO: | | |
| | | | | | 6099) | | |
| 15H6- | QYVLTQ | SGENLS | WYQQL | ENEKRP | GVPDRF | HYWESI | FGEGTE |
| LC_2 | PPSASG | DKYVH | PGTAPK | S (SEQ | SGSNSG | NSVV | LTVL |
| | TPGQRV | (SEQ ID | MLIY | ID NO: | NSASLA | (SEQ ID | (SEQ ID |
| | TISC | NO: | (SEQ ID | 6071) | ISGLRSE | NO: | NO: |
| | (SEQ ID | 6070) | NO: | | DEADY | 6072) | 6104) |
| | NO: | | 6102) | | YC (SEQ | | |
| | 6101) | | | | ID NO: | | |
| | | | | | 6103) | | |
| 15H6- | SYELTQ | SGENLS | WYQQK | ENEKRP | GIPERFS | HYWESI | FGEGTE |
| LC_3 | PPSVSV | DKYVH | PGQSPV | S (SEQ | GSNSGN | NSVV | LTVL |
| | SPGQTA | (SEQ ID | MVIY | ID NO: | TATLTIS | (SEQ ID | (SEQ ID |
| | SITC | NO: | (SEQ ID | 6071) | GTQAM | NO: | NO: |
| | (SEQ ID | 6070) | NO: | | DEADY | 6072) | 6108) |
| | NO: | | 6106) | | YC (SEQ | | |
| | 6105) | | | | ID NO: | | |
| | | | | | 6107) | | |
| 15H6- | DYVLTQ | SGENLS | WYLQK | ENEKRP | GVPDRF | HYWESI | FGQGTK |
| LC_4 | SPLSLPV | DKYVH | PGQSPQ | S (SEQ | SGSNSG | NSVV | VEIK |
| | TPGEPA | (SEQ ID | MLIY | ID NO: | NDATLK | (SEQ ID | (SEQ ID |
| | SISC | NO: | (SEQ ID | 6071) | ISRVEA | NO: | NO: |
| | (SEQ ID | 6070) | NO: | | EDVGV | 6072) | 6112) |
| | NO: | | 6110) | | YYC | | |
| | 6109) | | | | (SEQ ID | | |
| | | | | | NO: | | |
| | | | | | 6111) | | |
| 15H6- | AYQLTQ | SGENLS | WYQQK | ENEKRP | GVPSRF | HYWESI | FGQGTK |
| LC_5 | SPSSLSA | DKYVH | PGKAPK | S (SEQ | SGSNSG | NSVV | VEIK |
| | SVGDRV | (SEQ ID | MLIY | ID NO: | NDATLT | (SEQ ID | (SEQ ID |
| | TITC | NO: | (SEQ ID | 6071) | ISSLQPE | NO: | NO: |
| | (SEQ ID | 6070) | NO: | | DFATYY | 6072) | 6116) |
| | NO: | | 6114) | | C (SEQ | | |
| | 6113) | | | | ID NO: | | |
| | | | | | 6115) | | |
| 15H6- | EYVLTQ | SGENLS | WYQQK | ENEKRP | GIPARFS | HYWESI | FGQGTK |
| LC_6 | SPATLS | DKYVH | PGQAPR | S (SEQ | GSNSGN | NSVV | VEIK |
| | VSPGER | (SEQ ID | MLIY | ID NO: | EATLTIS | (SEQ ID | (SEQ ID |
| | ATLSC | NO: | (SEQ ID | 6071) | SLQSED | NO: | NO: |
| | (SEQ ID | 6070) | NO: | | FAVYYC | 6072) | 6120) |
| | NO: | | 6118) | | (SEQ ID | | |
| | 6117) | | | | NO: | | |
| | | | | | 6119) | | |
| 9D9-LC | SYTLTQ | SGENLS | WYQQK | ENDKRP | GIPDQFS | HCWDS | FGSGTH |
| | PPLVSV | DKYVH | PGRAPV | S (SEQ | GSNSGN | TNSAV | LTVL |
| | ALGQK | (SEQ ID | MVIY | ID NO: | IATLTIS | (SEQ ID | (SEQ ID |
| | ATIIC | NO: | (SEQ ID | 6064) | KAQAG | NO: | NO: |
| | (SEQ ID | 6070) | NO: | | YEADY | 7321) | 6076) |
| | NO: | | 6067) | | YC (SEQ | | |
| | 7320) | | | | ID NO: | | |
| | | | | | 7292) | | |
| 3A12-LC | SYTLTQ | SGENLS | WYQQK | ENDKRP | GIPDQFS | HCWDS | FGSGTH |
| | PPLVSV | DKYVH | PGRAPV | S (SEQ | GSNSGN | TNSAV | LTVL |
| | ALGQK | (SEQ ID | MVIY | ID NO: | IATLTIS | (SEQ ID | (SEQ ID |
| | ATIIC | NO: | (SEQ ID | 6064) | KAQAG | NO: | NO: |
| | (SEQ ID | 6070) | NO: | | YEADY | 7321) | 6076) |
| | NO: | | 6067) | | YC (SEQ | | |
| | 7320) | | | | ID NO: | | |
| | | | | | 7292) | | |
| 12D10-LC | SYTLTQ | SGENLS | WYQQK | ENEKRP | GIPDQFS | HYWESI | FGSGTH |
| | PPSLSV | DKYVH | PGRAPV | S (SEQ | GSNSGN | NSVV | LTVL |
| | APGQKA | (SEQ ID | MVIY | ID NO: | IATLTIS | (SEQ ID | (SEQ ID |
| | TIIC | NO: | (SEQ ID | 6071) | KAQPGS | NO: | NO: |
| | (SEQ ID | 6070) | NO: | | EADYYC | 6072) | 6076) |
| | NO: | | 6074) | | (SEQ ID | | |
| | 6073) | | | | NO: | | |
| | | | | | 6075) | | |
| 15E1-LC | SFTLTQ | SGEKLS | WYQQK | ENDRRP | GIPDQFS | QFWDST | FGGGTQ |
| | PPLVSV | DKYVH | PGRAPV | S (SEQ | GSNSGN | NSAV | LTVL |
| | AVGQV | (SEQ ID | MVIY | ID NO: | IASLTIS | (SEQ ID | (SEQ ID |
| | ATITC | NO: | (SEQ ID | 7327) | KAQAG | NO: | NO: |
| | (SEQ ID | 7326) | NO: | | DEADYF | 7329) | 6080) |
| | NO: | | 6067) | | C (SEQ | | |
| | 7325) | | | | ID NO: | | |
| | | | | | 7328) | | |
| 15E1 | SSETTQ | SGEKLS | WYQQK | ENDRRP | GIPERFS | QFWDST | FGGGTQ |
| Humanized | PPSVSV | DKYVH | PGQSPV | S (SEQ | GSNSGN | NSAV | LTVL |
| variant_VL | SPGQTA | (SEQ ID | MVIY | ID NO: | TATLTIS | (SEQ ID | (SEQ ID |
| 1 | SITC | NO: | (SEQ ID | 7327) | GTQAM | NO: | NO: |
| | (SEQ ID | 7326) | NO: | | DEADYF | 7329) | 6080) |
| | NO: | | 6106) | | C (SEQ | | |
| | 7335) | | | | ID NO: | | |
| | | | | | 7336) | | |
| 15E1 | SSETTQ | SGEKLS | WYQQK | ENDRRP | GIPERFS | QFWDST | FGGGTQ |
| Humanized | PHSVSV | DKYVH | PGQDPV | S (SEQ | GSNPGN | NSAV | LTVL |
| variant_VL | ATAQM | (SEQ ID | MVIY | ID NO: | TATLTIS | (SEQ ID | (SEQ ID |
| 2 | ARITC | NO: | (SEQ ID | 7327) | RIEAGD | NO: | NO: |
| | (SEQ ID | 7326) | NO: | | EADYFC | 7329) | 6080) |
| | NO: | | 6090) | | (SEQ ID | | |
| | 6089) | | | | NO: | | |
| | | | | | 7337) | | |
| 15E1 | QSVTTQ | SGEKLS | WYQQL | ENDRRP | GVPDRF | QFWDST | FGGGTQ |
| Humanized | PPSASG | DKYVH | PGTAPK | S (SEQ | SGSNSG | NSAV | LTVL |
| variant_VL | TPGQRV | (SEQ ID | MLIY | ID NO: | NSASLA | (SEQ ID | (SEQ ID |
| 3 | TISC | NO: | (SEQ ID | 7327) | ISGLRSE | NO: | NO: |
| | (SEQ ID | 7326) | NO: | | DEADYF | 7329) | 6080) |
| | NO: | | 6078) | | C (SEQ | | |
| | 6081) | | | | ID NO: | | |
| | | | | | 7338) | | |
| 15E1 | QSVTTQ | SGEKLS | WYQQL | ENDRRP | GVPDRF | QFWDST | FGGGTQ |
| Humanized | PPSVSG | DKYVH | PGTAPK | S (SEQ | SGSNSG | NSAV | LTVL |
| variant_VL | APGQRV | (SEQ ID | MLIY | ID NO: | NSASLA | (SEQ ID | (SEQ ID |
| 4 | TISC | NO: | (SEQ ID | 7327) | ITGLQA | NO: | NO: |
| | (SEQ ID | 7326) | NO: | | EDEADY | 7329) | 6080) |
| | NO: | | 6078) | | FC (SEQ | | |
| | 6077) | | | | ID NO: | | |
| | | | | | 7339) | | |
| 15E1 | DSVTTQ | SGEKLS | WYQQR | ENDRRP | GVPDRF | QFWDST | FGGGTK |
| Humanized | SPLSLPV | DKYVH | PGQSPR | S (SEQ | SGSNSG | NSAV | VEIK |
| variant_VL | TLGQPA | (SEQ ID | MLIY | ID NO: | NDATLK | (SEQ ID | (SEQ ID |
| 5 | SISC | NO: | (SEQ ID | 7327) | ISRVEA | NO: | NO: 233) |
| | (SEQ ID | 7326) | NO: | | EDVGV | 7329) | |
| | NO: | | 7341) | | YFC | | |
| | 7340) | | | | (SEQ ID | | |
| | | | | | NO: | | |
| | | | | | 7342) | | |

TABLE 35
Exemplary heavy chain CDRs and FWRs of NKp30-targeting antigen binding domains

| Ab | | | | | | | |
|---|---|---|---|---|---|---|---|
| ID | VHFWR1 | VHCDR1 | VHFWR2 | VHCDR2 | VHFWR3 | VHCDR3 | VHFWR4 |
| BKM | EIQLLES | ITTTGYH | WVRQAP | YIYSSGS | RFTISRD | GDWHYF | WGQGT |
| 0138 | GGGLVQ | WN (SEQ | GKGLEW | TSYNPSL | TSKNTFY | DY (SEQ | MVTVSS |
| | PGGSLRL | ID NO: | VG (SEQ | KS (SEQ | LQMNSL | ID NO: | (SEQ ID |
| | SCAVSGF | 7498) | ID NO: | ID NO: | RAEDTA | 7315) | NO: 6006) |
| | S (SEQ ID | | 6023) | 6001) | VYYCAR | | |
| | NO: 7497) | | | | (SEQ ID | | |
| | | | | | NO: 6024) | | |
| BKM | EIQLLES | ITTTGYH | WVRQAP | YIYSSGS | RFTISRD | GDWHYF | WGQGT |
| 0139 | GGGLVQ | WN (SEQ | GKGLEW | TSYNPSL | TSKNTFY | DY (SEQ | MVTVSS |
| | PGGSLRL | ID NO: | VG (SEQ | KS (SEQ | LQMNSL | ID NO: | (SEQ ID |
| | SCAVSGF | 7498) | ID NO: | ID NO: | RAEDTA | 7315) | NO: 6006) |
| | S (SEQ ID | | 6023) | 6001) | VYYCAR | | |
| | NO: 7497) | | | | (SEQ ID | | |
| | | | | | NO: 6024) | | |
| BKM | EIQLLES | ITTIGYH | WVRQAP | YIYSSGS | RFTISRD | GDWHYE | WGQGT |
| 0140 | GGGLVQ | WN (SEQ | GKGLEW | ISYNPSL | TSKNTFY | DY (SEQ | MVTVSS |
| | PGGSLRL | ID NO: | VG (SEQ | KS (SEQ | LQMNSL | ID NO: | (SEQ ID |
| | SCAVSGF | 7498) | ID NO: | ID NO: | RAEDTA | 7315) | NO: 6006) |
| | S (SEQ ID | | 6023) | 6001) | VYYCAR | | |
| | NO: 7497) | | | | (SEQ ID | | |
| | | | | | NO: 6024) | | |
| BKM | EIQLLES | ITTIGYH | WVRQAP | YTYSSGS | RFTISRD | GDWHYF | WGQGT |
| 0141 | GGGLVQ | WN (SEQ | GKGLEW | TSYNPSL | TSKNTFY | DY (SEQ | MVTVSS |
| | PGGSLRL | ID NO: | VG (SEQ | KS (SEQ | LQMNSL | ID NO: | (SEQ ID |
| | SCAVSGF | 7498) | ID NO: | ID NO: | RAEDTA | 7315) | NO: 6006) |
| | S (SEQ ID | | 6023) | 6001) | VYYCAR | | |
| | NO: 7497) | | | | (SEQ ID | | |
| | | | | | NO: 6024) | | |
| BKM | EIQLLES | ITTTGYH | WVRQAP | YIYSSGS | RFTISRD | GDWHYF | WGQGT |
| 0142 | GGGLVQ | WN (SEQ | GKGLEW | TSYAPSL | TSKNTFY | DY (SEQ | MVTVSS |
| | PGGSLRL | ID NO: | VG (SEQ | KS (SEQ | LQMNSL | ID NO: | (SEQ ID |
| | SCAVSGF | 7498) | ID NO: | ID NO: | RAEDTA | 7315) | NO: 6006) |
| | S (SEQ ID | | 6023) | 7437) | VYYCAR | | |
| | NO: 7497) | | | | (SEQ ID | | |
| | | | | | NO: 6024) | | |
| BKM | EIQLLES | ITTIGYH | WVRQAP | YIYSSGS | RFTISRD | GDWHYF | WGQGT |
| 0143 | GGGLVQ | WN (SEQ | GKGLEW | TSYAPSL | TSKNTFY | DY (SEQ | MVTVSS |
| | PGGSLRL | ID NO: | VG (SEQ | KS (SEQ | LQMNSL | ID NO: | (SEQ ID |
| | SCAVSGF | 7498) | ID NO: | ID NO: | RAEDTA | 7315) | NO: 6006) |
| | S (SEQ ID | | 6023) | 7437) | VYYCAR | | |
| | NO: 7497) | | | | (SEQ ID | | |
| | | | | | NO: 6024) | | |
| BKM | EIQLLES | ITTTGYH | WVRQAP | YIYSSGS | RFTISRD | GDWHYF | WGQGT |
| 0144 | GGGLVQ | WN (SEQ | GKGLEW | TSYAPSL | TSKNTFY | DY (SEQ | MVTVSS |
| | PGGSLRL | ID NO: | VG (SEQ | KS (SEQ | LQMNSL | ID NO: | (SEQ ID |
| | SCAVSGF | 7498) | ID NO: | ID NO: | RAEDTA | 7315) | NO: 6006) |
| | S (SEQ ID | | 6023) | 7437) | VYYCAR | | |
| | NO: 7497) | | | | (SEQ ID | | |
| | | | | | NO: 6024) | | |
| BKM | EIQLLES | ITTTGYH | WVRQAP | YIYSSGS | RFTISRD | GDWHYF | WGQGT |
| 0145 | GGGLVQ | WN (SEQ | GKGLEW | TSYAPSL | TSKNTFY | DY (SEQ | MVTVSS |
| | PGGSLRL | ID NO: | VG (SEQ | KS (SEQ | LQMNSL | ID NO: | (SEQ ID |
| | SCAVSGF | 7498) | ID NO: | ID NO: | RAEDTA | 7315) | NO: 6006) |
| | S (SEQ ID | | 6023) | 7437) | VYYCAR | | |
| | NO: 7497) | | | | (SEQ ID | | |
| | | | | | NO: 6024) | | |

TABLE 36
Exemplary light chain CDRs and FWRs of NKp30-targeting antigen binding domains

| Ab | | | | | | | |
|---|---|---|---|---|---|---|---|
| ID | VLFWR1 | VLCDR1 | VLFWR2 | VLCDR2 | VLFWR3 | VLCDR3 | VLFWR4 |
| BKM | DSVTTQS | SGEKLSD | WYQQRP | ENDRRPS | GVPDRES | QFWDST | FGGGTK |
| 0138 | PLSLPVT | KYVH | GQSPRM | (SEQ ID | GSNSGN | ASAV | VEIK |
| | LGQPASI | (SEQ ID | LIY (SEQ | NO: 7327) | DATLKIS | (SEQ ID | (SEQ ID |
| | SC (SEQ | NO: 7326) | ID NO: | | RVEAED | NO: 7416) | NO: 233) |
| | ID NO: | | 7341) | | VGVYFC | | |
| | 7493) | | | | (SEQ ID | | |
| | | | | | NO: 7342) | | |
| BKM | DSVTTQS | SGEKLSD | WYQQRP | ENDRRPS | GVPDRFS | QFWAST | FGGGTK |
| 0139 | PLSLPVT | KYVH | GQSPRM | (SEQ ID | GSNSGN | NSAV | VEIK |
| | LGQPASI | (SEQ ID | LIY (SEQ | NO: 7496) | DATLKIS | (SEQ ID | (SEQ ID |
| | SC (SEQ | NO: 7494) | ID NO: | | RVEAED | NO: 44) | NO: 233) |
| | ID NO: | | 7495) | | VGVYFC | | |
| | 7493) | | | | (SEQ ID | | |
| | | | | | NO: 7342) | | |
| BKM | SSETTQP | SGEKLSD | WYQQKP | ENDRRPS | GIPERFS | QFWAST | FGGGTQ |
| 0140 | PSVSVSP | KYVH | GQSPVM | (SEQ ID | GSNSGN | NSAV | LTVL |
| | GQTASIT | (SEQ ID | VIY (SEQ | NO: 7327) | TATLTIS | (SEQ ID | (SEQ ID |
| | C (SEQ ID | NO: 7326) | ID NO: | | GTQAMD | NO: 44) | NO: 6080) |
| | NO: 7335) | | 6106) | | BADYFC | | |
| | | | | | (SEQ ID | | |
| | | | | | NO: 7336) | | |
| BKM | SSETTQP | SGEKLSD | WYQQKP | ENDRRPS | GIPERFS | QFWDST | FGGGTQ |
| 0141 | PSVSVSP | KYVH | GQSPVM | (SEQ ID | GSNSGN | ASAV | LTVL |
| | GQTASIT | (SEQ ID | VIY (SEQ | NO: 7327) | TATLTIS | (SEQ ID | (SEQ ID |
| | C (SEQ ID | NO: 7326) | ID NO: | | GTQAMD | NO: 7416) | NO: 6080) |
| | NO: 7335) | | 6106) | | EADYFC | | |
| | | | | | (SEQ ID | | |
| | | | | | NO: 7336) | | |
| BKM | DSVTTQS | SGEKLSD | WYQQRP | ENDRRPS | GVPDRFS | QFWDST | FGGGTK |
| 0142 | PLSLPVT | KYVH | GQSPRM | (SEQ ID | GSNSGN | NSAV | VEIK |
| | LGQPASI | (SEQ ID | LIY (SEQ | NO: 7327) | DATLKIS | (SEQ ID | (SEQ ID |
| | SC (SEQ | NO: 7326) | ID NO: | | RVEAED | NO: 7329) | NO: 233) |
| | ID NO: | | 7341) | | VGVYFC | | |
| | 7493) | | | | (SEQ ID | | |
| | | | | | NO: 7342) | | |
| BKM | SSETTQP | SGEKLSD | WYQQKP | ENDRRPS | GIPERFS | QFWDST | FGGGTQ |
| 0143 | PSVSVSP | KYVH | GQSPVM | (SEQ ID | GSNSGN | NSAV | LTVL |
| | GQTASIT | (SEQ ID | VIY (SEQ | NO: 7327) | TATLTIS | (SEQ ID | (SEQ ID |
| | C (SEQ ID | NO: 7326) | ID NO: | | GTQAMD | NO: 7329) | NO: 6080) |
| | NO: 7335) | | 6106) | | EADYFC | | |
| | | | | | (SEQ ID | | |
| | | | | | NO: 7336) | | |
| BKM | DSVTTQS | SGEKLSD | WYQQRP | ENDRRPS | GVPDRFS | QFWAST | FGGGTK |
| 0144 | PLSLPVT | KYVH | GQSPRM | (SEQ ID | GSNSGN | ASAV | VEIK |
| | LGQPASI | (SEQ ID | LIY (SEQ | NO: 7327) | DATLKIS | (SEQ ID | (SEQ ID |
| | SC (SEQ | NO: 7326) | ID NO: | | RVEAED | NO: 7447) | NO: 233) |
| | ID NO: | | 7341) | | VGVYFC | | |
| | 7493) | | | | (SEQ ID | | |
| | | | | | NO: 7342) | | |
| BKM | SSETTQP | SGEKLSD | WYQQKP | ENDRRPS | GIPERFS | QFWAST | FGGGTQ |
| 0145 | PSVSVSP | KYVH | GQSPVM | (SEQ ID | GSNSGN | ASAV | LTVL |
| | GQTASIT | (SEQ ID | VIY (SEQ | NO: 7327) | TATLTIS | (SEQ ID | (SEQ ID |
| | C (SEQ ID | NO: 7326) | ID NO: | | GTQAMD | NO: 7447) | NO: 6080) |
| | NO: 7335) | | 6106) | | EADYFC | | |
| | | | | | (SEQ ID | | |
| | | | | | NO: 7336) | | |

TABLE 9
Exemplary variable regions of NKp30-targeting antigen binding domains

| SEQ ID | | | |
|---|---|---|---|
| NO | Ab ID | Description | Sequence |
| SEQ ID | 9G1-HC | 9G1 heavy chain | QIQLQESGPGLVKPSQSLSLTCSVTGFSINTGGYH |
| NO: 6121 | | variable region | WNWIRQFPGKKLEWMGYIYSSGSTSYNPSLKSRI |
| | | | SITRDTSKNQFFLQLNSVTTEDTATYYCARGNWH |
| | | | YFDFWGQGTMVTVSS |
| SEQ ID | 15H6-HC | 15H6 heavy | QIQLQESGPGLVKPSQSLSLTCSVTGFSINTGGYH |
| NO: 6122 | | chain variable | WNWIRQFPGKKLEWMGYIYSSGTTRYNPSLKSRI |
| | | region | SITRDTSKNQFFLQLNSVTPEDTATYYCTRGNWH |
| | | | YFDYWGQGTLVAVSS |
| SEQ ID | 9G1-HC_1 | 9G1 heavy chain | QIQLQESGPGLVKPSETLSLTCTVSGFSINTGGYH |
| NO: 6123 | | variable region | WNWIRQPAGKGLEWIGYIYSSGSTSYNPSLKSRV |
| | | humanized | TMSRDTSKNQFSLKLSSVTAADTAVYYCARGNW |
| | | variant 1 | HYFDFWGQGTMVTVSS |
| SEQ ID | 9G1-HC_2 | 9G1 heavy chain | QIQLQESGPGLVKPSQTLSLTCTVSGFSINTGGYH |
| NO: 6124 | | variable region | WNWIRQHPGKGLEWIGYIYSSGSTSYNPSLKSLV |
| | | humanized | TISRDTSKNQFSLKLSSVTAADTAVYYCARGNW |
| | | variant 2 | HYFDFWGQGTMVTVSS |
| SEQ ID | 9G1-HC_3 | 9G1 heavy chain | EIQLLESGGGLVQPGGSLRLSCAVSGFSINTGGYH |
| NO: 6125 | | variable region | WNWVRQAPGKGLEWVGYIYSSGSTSYNPSLKSR |
| | | humanized | FTISRDTSKNTFYLQMNSLRAEDTAVYYCARGN |
| | | variant 3 | WHYFDFWGQGTMVTVSS |
| SEQ ID | 9G1-HC_4 | 9G1 heavy chain | QIQLVQSGAEVKKPGSSVKVSCKVSGFSINTGGY |
| NO: 6126 | | variable region | HWNWVRQAPGQGLEWMGYIYSSGSTSYNPSLKS |
| | | humanized | RVTITRDTSTNTFYMELSSLRSEDTAVYYCARGN |
| | | variant 4 | WHYFDFWGQGTMVTVSS |
| SEQ ID | 9G1-HC_5 | 9G1 heavy chain | EIQLVESGGGLVQPGGSLRLSCAVSGFSINTGGYH |
| NO: 6127 | | variable region | WNWVRQAPGKGLEWVGYIYSSGSTSYNPSLKSR |
| | | humanized | FTISRDTAKNSFYLQMNSLRAEDTAVYYCARGN |
| | | variant 5 | WHYFDFWGQGTMVTVSS |
| SEQ ID | 9G1-HC_6 | 9G1 heavy chain | QIQLVQSGAEVKKPGASVKVSCKVSGFSINTGGY |
| NO: 6128 | | variable region | HWNWVRQAPGQGLEWMGYIYSSGSTSYNPSLKS |
| | | humanized | RVTMTRDTSTNTFYMELSSLRSEDTAVYYCARG |
| | | variant 6 | NWHYFDFWGQGTMVTVSS |
| SEQ ID | 15H6- | 15H6 heavy | QIQLQESGPGLVKPSQTLSLTCTVSGFSINTGGYH |
| NO: 6129 | HC_1 | chain variable | WNWIRQHPGKGLEWIGYIYSSGTTRYNPSLKSLV |
| | | region | TISRDTSKNQFSLKLSSVTAADTAVYYCARGNW |
| | | humanized | HYFDYWGQGTLVTVSS |
| | | variant 1 | |
| SEQ ID | 15H6- | 15H6 heavy | QIQLQESGPGLVKPSETLSLTCTVSGFSINTGGYH |
| NO: 6130 | HC_2 | chain variable | WNWIRQPAGKGLEWIGYIYSSGTTRYNPSLKSRV |
| | | region | TMSRDTSKNQFSLKLSSVTAADTAVYYCARGNW |
| | | humanized | HYFDYWGQGTLVTVSS |
| | | variant 2 | |
| SEQ ID | 15H6- | 15H6 heavy | EIQLLESGGGLVQPGGSLRLSCAVSGFSINTGGYH |
| NO: 6131 | HC_3 | chain variable | WNWVRQAPGKGLEWVGYIYSSGTTRYNPSLKSR |
| | | region | FTISRDTSKNTFYLQMNSLRAEDTAVYYCARGN |
| | | humanized | WHYFDYWGQGTLVTVSS |
| | | variant 3 | |
| SEQ ID | 15H6- | 15H6 heavy | QIQLVESGGGLVKPGGSLRLSCAVSGFSINTGGY |
| NO: 6132 | HC_4 | chain variable | HWNWIRQAPGKGLEWVGYIYSSGTTRYNPSLKS |
| | | region | RFTISRDTAKNSFYLQMNSLRAEDTAVYYCARG |
| | | humanized | NWHYFDYWGQGTLVTVSS |
| | | variant 4 | |
| SEQ ID | 15H6- | 15H6 heavy | QIQLVQSGAEVKKPGASVKVSCKVSGFSINTGGY |
| NO: 6133 | HC_5 | chain variable | HWNWVRQAPGQGLEWMGYIYSSGTTRYNPSLK |
| | | region | SRVTMTRDTSTNTFYMELSSLRSEDTAVYYCARG |
| | | humanized | NWHYFDYWGQGTLVTVSS |
| | | variant 5 | |
| SEQ ID | 15H6- | 15H6 heavy | EIQLVQSGAEVKKPGATVKISCKVSGFSINTGGYH |
| NO: 6134 | HC_6 | chain variable | WNWVQQAPGKGLEWMGYIYSSGTTRYNPSLKS |
| | | region | RVTITRDTSTNTFYMELSSLRSEDTAVYYCARGN |
| | | humanized | WHYFDYWGQGTLVTVSS |
| | | variant 6 | |
| SEQ ID | 9G1-LC | 9G1 light chain | SYTLTQPPLLSVALGHKATITCSGERLSDKYVHW |
| NO: 7294 | | variable region | YQQKPGRAPVMVIYENDKRPSGIPDQFSGSNSGN |
| | | | IATLTISKAQAGYEADYYCQSWDSTNSAVFGSGT |
| | | | QLTVL |
| SEQ ID | 15H6-LC | 15H6 light chain | SYTLTQPPSLSVAPGQKATIICSGENLSDKYVHW |
| NO: 6136 | | variable region | YQQKPGRAPVMVIYENEKRPSGIPDQFSGSNSGNI |
| | | | ATLTISKAQPGSEADYYCHYWESINSVVFGSGTH |
| | | | LTVL |
| SEQ ID | 9G1-LC_1 | 9G1 light chain | QSVTTQPPSVSGAPGQRVTISCSGERLSDKYVHW |
| NO: 6137 | | variable region | YQQLPGTAPKMLIYENDKRPSGVPDRFSGSNSGN |
| | | humanized | SASLAITGLQAEDEADYYCQSWDSTNSAVFGGG |
| | | variant 1 | TQLTVL |
| SEQ ID | 9G1-LC_2 | 9G1 light chain | QSVTTQPPSASGTPGQRVTISCSGERLSDKYVHW |
| NO: 6138 | | variable region | YQQLPGTAPKMLIYENDKRPSGVPDRFSGSNSGN |
| | | humanized | SASLAISGLQSEDEADYYCQSWDSTNSAVFGGGT |
| | | variant 2 | QLTVL |
| SEQ ID | 9G1-LC_3 | 9G1 light chain | QSVTTQPPSASGTPGQRVTISCSGERLSDKYVHW |
| NO: 6139 | | variable region | YQQLPGTAPKMLIYENDKRPSGVPDRFSGSNSGN |
| | | humanized | SASLAISGLRSEDEADYYCQSWDSTNSAVFGGGT |
| | | variant 3 | QLTVL |
| SEQ ID | 9G1-LC_4 | 9G1 light chain | SSETTQPHSVSVATAQMARITCSGERLSDKYVHW |
| NO: 6140 | | variable region | YQQKPGQDPVMVIYENDKRPSGIPERFSGSNPGN |
| | | humanized | TATLTISRIEAGDEADYYCQSWDSTNSAVFGGGT |
| | | variant 4 | QLTVL |
| SEQ ID | 9G1-LC_5 | 9G1 light chain | DIQMTQSPSTLSASVGDRVTITCSGERLSDKYVH |
| NO: 6141 | | variable region | WYQQKPGKAPKMLIYENDKRPSGVPSRFSGSNS |
| | | humanized | GNEATLTISSLQPDDFATYYCQSWDSTNSAVFGQ |
| | | variant 5 | GTKVEIK |
| SEQ ID | 15H6- | 15H6 light chain | QYVLTQPPSASGTPGQRVTISCSGENLSDKYVHW |
| NO: 6142 | LC_1 | variable region | YQQLPGTAPKMLIYENEKRPSGVPDRFSGSNSGN |
| | | humanized | SASLAISGLQSEDEADYYCHYWESINSVVFGEGT |
| | | variant 1 | ELTVL |
| SEQ ID | 15H6- | 15H6 light chain | QYVLTQPPSASGTPGQRVTISCSGENLSDKYVHW |
| NO: 6143 | LC_2 | variable region | YQQLPGTAPKMLIYENEKRPSGVPDRFSGSNSGN |
| | | humanized | SASLAISGLRSEDEADYYCHYWESINSVVFGEGT |
| | | variant 2 | ELTVL |
| SEQ ID | 15H6- | 15H6 light chain | SYELTQPPSVSVSPGQTASITCSGENLSDKYVHW |
| NO: 6144 | LC_3 | variable region | YQQKPGQSPVMVIYENEKRPSGIPERFSGSNSGNT |
| | | humanized | ATLTISGTQAMDEADYYCHYWESINSVVFGEGTE |
| | | variant 3 | LTVL |
| SEQ ID | 15H6- | 15H6 light chain | DYVLTQSPLSLPVTPGEPASISCSGENLSDKYVHW |
| NO: 6145 | LC_4 | variable region | YLQKPGQSPQMLIYENEKRPSGVPDRFSGSNSGN |
| | | humanized | DATLKISRVEAEDVGVYYCHYWESINSVVFGQG |
| | | variant 4 | TKVEIK |
| SEQ ID | 15H6- | 15H6 light chain | AYQLTQSPSSLSASVGDRVTITCSGENLSDKYVH |
| NO: 6146 | LC_5 | variable region | WYQQKPGKAPKMLIYENEKRPSGVPSRFSGSNSG |
| | | humanized | NDATLTISSLQPEDFATYYCHYWESINSVVFGQG |
| | | variant 5 | TKVEIK |
| SEQ ID | 15H6- | 15H6 light chain | EYVLTQSPATLSVSPGERATLSCSGENLSDKYVH |
| NO: 6147 | LC_6 | variable region | WYQQKPGQAPRMLIYENEKRPSGIPARFSGSNSG |
| | | humanized | NEATLTISSLQSEDFAVYYCHYWESINSVVFGQG |
| | | variant 6 | TKVEIK |
| SEQ ID | 9D9-HC | 9D9 heavy chain | QIQLQESGPGLVKPSQSLSLSCSVTGFSINTGGYH |
| NO: 7295 | | variable region | WNWIRQFPGKKVEWMGYIYSSGTTKYNPSLKSRI |
| | | | SITRDTSKNQFFLQLNSVTTEDTATYYCARGDWH |
| | | | YFDYWGQGTMVAVSS |
| SEQ ID | 9D9-LC | 9D9 light chain | SYTLTQPPLVSVALGQKATIICSGENLSDKYVHW |
| NO: 7296 | | variable region | YQQKPGRAPVMVIYENDKRPSGIPDQFSGSNSGN |
| | | | IATLTISKAQAGYEADYYCHCWDSTNSAVFGSGT |
| | | | HLTVL |
| SEQ ID | 3A12-HC | 3A12 heavy | QIQLQESGPGLVKPSQSLSLTCSVTGFSINTGGYH |
| NO: 7297 | | chain variable | WNWIRQFPGKKLEWMGYIYSSGSTRYNPSLKSRF |
| | | region | SITRDTSKNQFFLQLNSVTTEDTATYYCTRGNWH |
| | | | YFDYWGQGTLVAVSS |
| SEQ ID | 3A12-LC | 3A12 light chain | SYTLTQPPLVSVALGQKATIICSGENLSDKYVHW |
| NO: 7296 | | variable region | YQQKPGRAPVMVIYENDKRPSGIPDQFSGSNSGN |
| | | | IATLTISKAQAGYEADYYCHCWDSTNSAVFGSGT |
| | | | HLTVL |
| SEQ ID | 12D10-HC | 12D10 heavy | QIQLQESGPGLVKPSQSLSLTCSVTGFSINTGGYH |
| NO: 6122 | | chain variable | WNWIRQFPGKKLEWMGYIYSSGTTRYNPSLKSRI |
| | | region | SITRDTSKNQFFLQLNSVTPEDTATYYCTRGNWH |
| | | | YFDYWGQGTLVAVSS |
| SEQ ID | 12D10-LC | 12D10 light | SYTLTQPPSLSVAPGQKATIICSGENLSDKYVHW |
| NO: 6136 | | chain variable | YQQKPGRAPVMVIYENEKRPSGIPDQFSGSNSGNI |
| | | region | ATLTISKAQPGSEADYYCHYWESINSVVFGSGTH |
| | | | LTVL |
| SEQ ID | 15E1-HC | 15E1 heavy | QIQLQESGPGLVKPSQSLSLSCSVTGFSITTTGYH |
| NO: 7298 | | chain variable | WNWIRQFPGKKLEWMGYIYSSGSTSYNPSLKSRF |
| | | region | SITRDTSKNQFFLQLNSVTTEDTATYYCARGDWH |
| | | | YFDYWGPGTMVTVSS |
| SEQ ID | 15E1-LC | 15E1 light chain | SFTLTQPPLVSVAVGQVATITCSGEKLSDKYVHW |
| NO: 7299 | | variable region | YQQKPGRAPVMVIYENDRRPSGIPDQFSGSNSGNI |
| | | | ASLTISKAQAGDEADYFCQFWDSTNSAVFGGGT |
| | | | QLTVL |
| SEQ ID | 15E1_ | 15E1 heavy | QIQLQESGPGLVKPSQTLSLTCTVSGFSITTTGYH |
| NO: 7300 | Humanized | chain variable | WNWIRQHPGKGLEWIGYIYSSGSTSYNPSLKSLV |
| | variant_VH | region | TISRDTSKNQFSLKLSSVTAADTAVYYCARGDW |
| | 1 | humanized | HYFDYWGQGTMVTVSS |
| | | variant 1 | |
| SEQ ID | 15E1_ | 15E1 heavy | QIQLVESGGGLVKPGGSLRLSCAVSGFSITTTGYH |
| NO: 7301 | Humanized | chain variable | WNWIRQAPGKGLEWVGYIYSSGSTSYNPSLKSRF |
| | variant_VH | region | TISRDTAKNSFYLQMNSLRAEDTAVYYCARGDW |
| | 2 | humanized | HYFDYWGQGTMVTVSS |
| | | variant 2 | |
| SEQ ID | 15E1_ | 15E1 heavy | EIQLLESGGGLVQPGGSLRLSCAVSGFSITTTGYH |
| NO: 7302 | Humanized | chain variable | WNWVRQAPGKGLEWVGYIYSSGSTSYNPSLKSR |
| | variant_VH | region | FTISRDTSKNTFYLQMNSLRAEDTAVYYCARGD |
| | 3 | humanized | WHYFDYWGQGTMVTVSS |
| | (BJM0407 | variant 3 | |
| | VH and | | |
| | BJM0411 | | |
| | VH) | | |
| SEQ ID | 15E1_ | 15E1 heavy | EIQLVESGGGLVQPGGSLRLSCAVSGFSITTTGYH |
| NO: 7303 | Humanized | chain variable | WNWVRQAPGKGLEWVGYIYSSGSTSYNPSLKSR |
| | variant_VH | region | FTISRDTAKNSFYLQMNSLRAEDTAVYYCARGD |
| | 4 | humanized | WHYFDYWGQGTMVTVSS |
| | | variant 4 | |
| SEQ ID | 15E1_ | 15E1 heavy | QIQLVQSGAEVKKPGASVKVSCKVSGFSITTTGY |
| NO: 7304 | Humanized | chain variable | HWNWVRQAPGQGLEWMGYIYSSGSTSYNPSLKS |
| | variant_VH | region | RVTMTRDTSTNTFYMELSSLRSEDTAVYYCARG |
| | 5 | humanized | DWHYFDYWGQGTMVTVSS |
| | | variant 5 | |
| SEQ ID | 15E1_ | 15E1 light chain | SSETTQPPSVSVSPGQTASITCSGEKLSDKYVHWY |
| NO: 7305 | Humanized | variable region | QQKPGQSPVMVIYENDRRPSGIPERFSGSNSGNTA |
| | variant_VL | humanized | TLTISGTQAMDEADYFCQFWDSTNSAVFGGGTQ |
| | 1 | variant 1 | LTVL |
| | (BJM0407 | | |
| | VL) | | |
| SEQ ID | 15E1_ | 15E1 light chain | SSETTQPHSVSVATAQMARITCSGEKLSDKYVHW |
| NO: 7306 | Humanized | variable region | YQQKPGQDPVMVIYENDRRPSGIPERFSGSNPGN |
| | variant_VL | humanized | TATLTISRIEAGDEADYFCQFWDSTNSAVFGGGT |
| | 2 | variant 2 | QLTVL |
| SEQ ID | 15E1_ | 15E1 light chain | QSVTTQPPSASGTPGQRVTISCSGEKLSDKYVHW |
| NO: 7307 | Humanized | variable region | YQQLPGTAPKMLIYENDRRPSGVPDRFSGSNSGN |
| | variant_VL | humanized | SASLAISGLRSEDEADYFCQFWDSTNSAVFGGGT |
| | 3 | variant 3 | QLTVL |
| SEQ ID | 15E1_ | 15E1 light chain | QSVTTQPPSVSGAPGQRVTISCSGEKLSDKYVHW |
| NO: 7308 | Humanized | variable region | YQQLPGTAPKMLIYENDRRPSGVPDRFSGSNSGN |
| | variant_VL | humanized | SASLAITGLQAEDEADYFCQFWDSTNSAVFGGGT |
| | 4 | variant 4 | QLTVL |
| SEQ ID | 15E1_ | 15E1 light chain | DSVTTQSPLSLPVTLGQPASISCSGEKLSDKYVHW |
| NO: 7309 | Humanized | variable region | YQQRPGQSPRMLIYENDRRPSGVPDRFSGSNSGN |
| | variant_VL | humanized | DATLKISRVEAEDVGVYFCQFWDSTNSAVFGGG |
| | 5 | variant 5 | TKVEIK |
| | (BJM0411 | | |
| | VL) | | |
| SEQ ID | BKM0138 | BKM0138 | EIQLLESGGGLVQPGGSLRLSCAVSGFSITTTGYH |
| NO: 7302 | VH | heavy chain | WNWVRQAPGKGLEWVGYIYSSGSTSYNPSLKSR |
| | | variable region | FTISRDTSKNTFYLQMNSLRAEDTAVYYCARGD |
| | | | WHYFDYWGQGTMVTVSS |
| SEQ ID | BKM0139 | BKM0139 | EIQLLESGGGLVQPGGSLRLSCAVSGFSITTTGYH |
| NO: 7302 | VH | heavy chain | WNWVRQAPGKGLEWVGYIYSSGSTSYNPSLKSR |
| | | variable region | FTISRDTSKNTFYLQMNSLRAEDTAVYYCARGD |
| | | | WHYFDYWGQGTMVTVSS |
| SEQ ID | BKM0140 | BKM0140 | EIQLLESGGGLVQPGGSLRLSCAVSGFSITTTGYH |
| NO: 7302 | VH | heavy chain | WNWVRQAPGKGLEWVGYIYSSGSTSYNPSLKSR |
| | | variable region | FTISRDTSKNTFYLQMNSLRAEDTAVYYCARGD |
| | | | WHYFDYWGQGTMVTVSS |
| SEQ ID | BKM0141 | BKM0141 | EIQLLESGGGLVQPGGSLRLSCAVSGFSITTTGYH |
| NO: 7302 | VH | heavy chain | WNWVRQAPGKGLEWVGYIYSSGSTSYNPSLKSR |
| | | variable region | FTISRDTSKNTFYLQMNSLRAEDTAVYYCARGD |
| | | | WHYFDYWGQGTMVTVSS |
| SEQ ID | BKM0142 | BKM0142 | EIQLLESGGGLVQPGGSLRLSCAVSGFSITTTGYH |
| NO: 7390 | VH | heavy chain | WNWVRQAPGKGLEWVGYIYSSGSTSYAPSLKSR |
| | | variable region | FTISRDTSKNTFYLQMNSLRAEDTAVYYCARGD |
| | | | WHYFDYWGQGTMVTVSS |
| SEQ ID | BKM0143 | BKM0143 | EIQLLESGGGLVQPGGSLRLSCAVSGFSITTTGYH |
| NO: 7390 | VH | heavy chain | WNWVRQAPGKGLEWVGYIYSSGSTSYAPSLKSR |
| | | variable region | FTISRDTSKNTFYLQMNSLRAEDTAVYYCARGD |
| | | | WHYFDYWGQGTMVTVSS |
| SEQ ID | BKM0144 | BKM0144 | EIQLLESGGGLVQPGGSLRLSCAVSGFSITTTGYH |
| NO: 7390 | VH | heavy chain | WNWVRQAPGKGLEWVGYIYSSGSTSYAPSLKSR |
| | | variable region | FTISRDTSKNTFYLQMNSLRAEDTAVYYCARGD |
| | | | WHYFDYWGQGTMVTVSS |
| SEQ ID | BKM0145 | BKM0145 | EIQLLESGGGLVQPGGSLRLSCAVSGFSITTTGYH |
| NO: 7390 | VH | heavy chain | WNWVRQAPGKGLEWVGYIYSSGSTSYAPSLKSR |
| | | variable region | FTISRDTSKNTFYLQMNSLRAEDTAVYYCARGD |
| | | | WHYFDYWGQGTMVTVSS |
| SEQ ID | BKM0138 | BKM0138 light | DSVTTQSPLSLPVTLGQPASISCSGEKLSDKYVHW |
| NO: 7395 | VL | chain variable | YQQRPGQSPRMLIYENDRRPSGVPDRFSGSNSGN |
| | | region | DATLKISRVEAEDVGVYFCQFWDSTASAVFGGG |
| | | | TKVEIK |
| SEQ ID | BKM0139 | BKM0139 light | DSVTTQSPLSLPVTLGQPASISCSGEKLSDKYVHW |
| NO: 7397 | VL | chain variable | YQQRPGQSPRMLIYENDRRPSGVPDRFSGSNSGN |
| | | region | DATLKISRVEAEDVGVYFCQFWASTNSAVFGGG |
| | | | TKVEIK |
| SEQ ID | BKM0140 | BKM0140 light | SSETTQPPSVSVSPGQTASITCSGEKLSDKYVHWY |
| NO: 7399 | VL | chain variable | QQKPGQSPVMVIYENDRRPSGIPERFSGSNSGNTA |
| | | region | TLTISGTQAMDEADYFCQFWASTNSAVFGGGTQ |
| | | | LTVL |
| SEQ ID | BKM0141 | BKM0141 light | SSETTQPPSVSVSPGQTASITCSGEKLSDKYVHWY |
| NO: 7401 | VL | chain variable | QQKPGQSPVMVIYENDRRPSGIPERFSGSNSGNTA |
| | | region | TLTISGTQAMDEADYFCQFWDSTASAVFGGGTQ |
| | | | LTVL |
| SEQ ID | BKM0142 | BKM0142 light | DSVTTQSPLSLPVTLGQPASISCSGEKLSDKYVHW |
| NO: 7309 | VL | chain variable | YQQRPGQSPRMLIYENDRRPSGVPDRFSGSNSGN |
| | | region | DATLKISRVEAEDVGVYFCQFWDSTNSAVFGGG |
| | | | TKVEIK |
| SEQ ID | BKM0143 | BKM0143 light | SSETTQPPSVSVSPGQTASITCSGEKLSDKYVHWY |
| NO: 7305 | VL | chain variable | QQKPGQSPVMVIYENDRRPSGIPERFSGSNSGNTA |
| | | region | TLTISGTQAMDEADYFCQFWDSTNSAVFGGGTQ |
| | | | LTVL |
| SEQ ID | BKM0144 | BKM0144 light | DSVTTQSPLSLPVTLGQPASISCSGEKLSDKYVHW |
| NO: 7404 | VL | chain variable | YQQRPGQSPRMLIYENDRRPSGVPDRFSGSNSGN |
| | | region | DATLKISRVEAEDVGVYFCQFWASTASAVFGGG |
| | | | TKVEIK |
| SEQ ID | BKM0145 | BKM0145 light | SSETTQPPSVSVSPGQTASITCSGEKLSDKYVHWY |
| NO: 7405 | VL | chain variable | QQKPGQSPVMVIYENDRRPSGIPERFSGSNSGNTA |
| | | region | TLTISGTQAMDEADYFCQFWASTASAVFGGGTQ |
| | | | LTVL |

TABLE 10
Exemplary NKp30-targeting antigen binding domains/antibody molecules

| SEQ ID | | | |
|---|---|---|---|
| NO | Ab ID | Description | Sequence |
| SEQ ID | Ch(anti- | 9G1 heavy | QIQLQESGPGLVKPSQSLSLTCSVTGFSINTGGYHWN |
| NO: | NKp30 | chain | WIRQFPGKKLEWMGYIYSSGSTSYNPSLKSRISITRD |
| 6148 | 9G1)HC | | TSKNQFFLQLNSVTTEDTATYYCARGNWHYFDFWG |
| | N297A | | QGTMVTVSSASTKGPSVFPLAPSSKSTSGGTAALGC |
| | | | LVKDYFPEPVTVSWNSGALTSGVHTFPAVLQSSGLY |
| | | | SLSSVVTVPSSSLGTQTYICNVNHKPSNTKVDKRVE |
| | | | PKSCDKTHTCPPCPAPELLGGPSVFLFPPKPKDTLMI |
| | | | SRTPEVTCVVVDVSHEDPEVKFNWYVDGVEVHNA |
| | | | KTKPREEQYASTYRVVSVLTVLHQDWLNGKEYKC |
| | | | KVSNKALPAPIEKTISKAKGQPREPQVCTLPPSREEM |
| | | | TKNQVSLSCAVKGFYPSDIAVEWESNGQPENNYKT |
| | | | TPPVLDSDGSFFLVSKLTVDKSRWQQGNVFSCSVM |
| | | | HEALHNHYTQKSLSLSPGK |
| SEQ ID | Ch(anti- | 9G1 heavy | QIQLQESGPGLVKPSQSLSLTCSVTGFSINTGGYHWN |
| NO: | NKp30 | chain | WIRQFPGKKLEWMGYIYSSGSTSYNPSLKSRISITRD |
| 6149 | 9G1)HC | | TSKNQFFLQLNSVTTEDTATYYCARGNWHYFDFWG |
| | | | QGTMVTVSSASTKGPSVFPLAPSSKSTSGGTAALGC |
| | | | LVKDYFPEPVTVSWNSGALTSGVHTFPAVLQSSGLY |
| | | | SLSSVVTVPSSSLGTQTYICNVNHKPSNTKVDKRVE |
| | | | PKSCDKTHTCPPCPAPELLGGPSVFLFPPKPKDTLMI |
| | | | SRTPEVTCVVVDVSHEDPEVKFNWYVDGVEVHNA |
| | | | KTKPREEQYNSTYRVVSVLTVLHQDWLNGKEYKC |
| | | | KVSNKALPAPIEKTISKAKGQPREPQVCTLPPSREEM |
| | | | TKNQVSLSCAVKGFYPSDIAVEWESNGQPENNYKT |
| | | | TPPVLDSDGSFFLVSKLTVDKSRWQQGNVFSCSVM |
| | | | HEALHNHYTQKSLSLSPGK |
| SEQ ID | Ch(anti- | 9G1 light | SYTLTQPPLLSVALGHKATITCSGERLSDKYVHWYQ |
| NO: | NKp30 | chain | QKPGRAPVMVIYENDKRPSGIPDQFSGSNSGNIATLT |
| 6150 | 9G1)LC | | ISKAQAGYEADYYCQSWDSTNSAVFGSGTQLTVLG |
| | | | QPKANPTVTLFPPSSEELQANKATLVCLISDFYPGAV |
| | | | TVAWKADGSPVKAGVETTKPSKQSNNKYAASSYLS |
| | | | LTPEQWKSHRSYSCQVTHEGSTVEKTVAPTECS |
| SEQ ID | Ch(anti- | 15H6 | QIQLQESGPGLVKPSQSLSLTCSVTGFSINTGGYHWN |
| NO: | NKp30 | heavy | WIRQFPGKKLEWMGYIYSSGTTRYNPSLKSRISITRD |
| 6151 | 15H6)HC | chain | TSKNQFFLQLNSVTPEDTATYYCTRGNWHYFDYWG |
| | N297A | | QGTLVAVSSASTKGPSVFPLAPSSKSTSGGTAALGC |
| | | | LVKDYFPEPVTVSWNSGALTSGVHTFPAVLQSSGLY |
| | | | SLSSVVTVPSSSLGTQTYICNVNHKPSNTKVDKRVE |
| | | | PKSCDKTHTCPPCPAPELLGGPSVFLFPPKPKDTLMI |
| | | | SRTPEVTCVVVDVSHEDPEVKFNWYVDGVEVHNA |
| | | | KTKPREEQYASTYRVVSVLTVLHQDWLNGKEYKC |
| | | | KVSNKALPAPIEKTISKAKGQPREPQVCTLPPSREEM |
| | | | TKNQVSLSCAVKGFYPSDIA VEWESNGQPENNYKT |
| | | | TPPVLDSDGSFFLVSKLTVDKSRWQQGNVFSCSVM |
| | | | HEALHNHYTQKSLSLSPGK |
| SEQ ID | Ch(anti- | 15H6 | QIQLQESGPGLVKPSQSLSLTCSVTGFSINTGGYHWN |
| NO: | NKp30 | heavy | WIRQFPGKKLEWMGYIYSSGTTRYNPSLKSRISITRD |
| 6152 | 15H6)HC | chain | TSKNQFFLQLNSVTPEDTATYYCTRGNWHYFDYWG |
| | (hole) | | QGTLVAVSSASTKGPSVFPLAPSSKSTSGGTAALGC |
| | | | LVKDYFPEPVTVSWNSGALTSGVHTFPAVLQSSGLY |
| | | | SLSSVVTVPSSSLGTQTYICNVNHKPSNTKVDKRVE |
| | | | PKSCDKTHTCPPCPAPELLGGPSVFLFPPKPKDTLMI |
| | | | SRTPEVTCVVVDVSHEDPEVKFNWYVDGVEVHNA |
| | | | KTKPREEQYNSTYRVVSVLTVLHQDWLNGKEYKC |
| | | | KVSNKALPAPIEKTISKAKGQPREPQVCTLPPSREEM |
| | | | TKNQVSLSCAVKGFYPSDIAVEWESNGQPENNYKT |
| | | | TPPVLDSDGSFFLVSKLTVDKSRWQQGNVFSCSVM |
| | | | HEALHNHYTQKSLSLSPGK |
| SEQ ID | Ch(anti- | 15H6 light | SYTLTQPPSLSVAPGQKATIICSGENLSDKYVHWYQ |
| NO: | NKp30 | chain | QKPGRAPVMVIYENEKRPSGIPDQFSGSNSGNIATLT |
| 6153 | 15H6)LC | | ISKAQPGSEADYYCHYWESINSVVFGSGTHLTVLGQ |
| | | | PKANPTVTLFPPSSEELQANKATLVCLISDFYPGAVT |
| | | | VAWKADGSPVKAGVETTKPSKQSNNKYAASSYLSL |
| | | | TPEQWKSHRSYSCQVTHEGSTVEKTVAPTECS |
| SEQ ID | anti-NKp30 | Hamster | QIQLQESGPGLVKPSQSLSLTCSVTGFSINTGGYHWN |
| NO: | 9G1 scFv | anti- | WIRQFPGKKLEWMGYIYSSGSTSYNPSLKSRISITRD |
| 6187 | (VH-VL) | NKp30 | TSKNQFFLQLNSVTTEDTATYYCARGNWHYFDFWG |
| | | scFv of | QGTMVTVSSGGGGSGGGGGGGGSGGGGSSYTLTQ |
| | | 9G1 in VH | PPLLSVALGHKATITCSGERLSDKYVHWYQQKPGR |
| | | to VL | APVMVIYENDKRPSGIPDQFSGSNSGNIATLTISKAQ |
| | | orientation | AGYEADYYCQSWDSTNSAVFGSGTQLTVL |
| SEQ ID | anti-NKp30 | Hamster | SYTLTQPPLLSVALGHKATITCSGERLSDKYVHWYQ |
| NO: | 9G1 scFv | anti- | QKPGRAPVMVIYENDKRPSGIPDQFSGSNSGNIATLT |
| 6188 | (VL-VH) | NKp30 | ISKAQAGYEADYYCQSWDSTNSAVFGSGTQLTVLG |
| | | scFv of | GGGSGGGGSGGGGSGGGGSQIQLQESGPGLVKPSQ |
| | | 9G1 in VL | SLSLTCSVTGFSINTGGYHWNWIRQFPGKKLEWMG |
| | | to VH | YIYSSGSTSYNPSLKSRISITRDTSKNQFFLQLNSVTT |
| | | orientation | EDTATYYCARGNWHYFDFWGQGTMVTVSS |
| SEQ ID | anti-NKp30 | Hamster | QIQLQESGPGLVKPSQSLSLTCSVTGFSINTGGYHWN |
| NO: | 15H6 scFv | anti- | WIRQFPGKKLEWMGYIYSSGTTRYNPSLKSRISITRD |
| 6189 | (VH-VL) | NKp30 | TSKNQFFLQLNSVTPEDTATYYCTRGNWHYFDYWG |
| | | scFv of | QGTLVAVSSGGGGSGGGGSGGGGSGGGGSSYTLTQ |
| | | 15H6 in | PPSLSVAPGQKATIICSGENLSDKYVHWYQQKPGRA |
| | | VH to VL | PVMVIYENEKRPSGIPDQFSGSNSGNIATLTISKAQP |
| | | orientation | GSEADYYCHYWESINSVVFGSGTHLTVL |
| SEQ ID | anti-NKp30 | Hamster | SYTLTQPPSLSVAPGQKATIICSGENLSDKYVHWYQ |
| NO: | 15H6 scFv | anti- | QKPGRAPVMVIYENEKRPSGIPDQFSGSNSGNIATLT |
| 6190 | (VL-VH) | NKp30 | ISKAQPGSEADYYCHYWESINSVVFGSGTHLTVLGG |
| | | scFv of | GGSGGGGSGGGGSGGGGSQIQLQESGPGLVKPSQSL |
| | | 15H6 in | SLTCSVTGFSINTGGYHWNWIRQFPGKKLEWMGYI |
| | | VL to VH | YSSGTTRYNPSLKSRISITRDTSKNQFFLQLNSVTPED |
| | | orientation | TATYYCTRGNWHYFDYWGQGTLVAVSS |
| SEQ ID | BJM0859 | | EIQLLESGGGLVQPGGSLRLSCAVSGFSITTTGYHW |
| NO: | lambda scFv | | NWVRQAPGKGLEWVGYIYSSGSTSYNPSLKSRFTIS |
| 7310 | | | RDTSKNTFYLQMNSLRAEDTAVYYCARGDWHYFD |
| | | | YWGQGTMVTVSSGGGGSGGGGSGGGGSGGGGSSS |
| | | | ETTQPPSVSVSPGQTASITCSGEKLSDKYVHWYQQK |
| | | | PGQSPVMVIYENDRRPSGIPERFSGSNSGNTATLTIS |
| | | | GTQAMDEADYFCQFWDSTNSAVFGGGTQLTVL |
| SEQ ID | BJM0860 | | EIQLLESGGGLVQPGGSLRLSCAVSGFSITTTGYHW |
| NO: | kappa scFv | | NWVRQAPGKGLEWVGYIYSSGSTSYNPSLKSRFTIS |
| 7311 | | | RDTSKNTFYLQMNSLRAEDTAVYYCARGDWHYFD |
| | | | YWGQGTMVTVSSGGGGSGGGGSGGGGSGGGGSDS |
| | | | VTTQSPLSLPVTLGQPASISCSGEKLSDKYVHWYQQ |
| | | | RPGQSPRMLIYENDRRPSGVPDRFSGSNSGNDATLKI |
| | | | SRVEAEDVGVYFCQFWDSTNSAVFGGGTKVEIK |
| SEQ ID | BKM0138 | | EIQLLESGGGLVQPGGSLRLSCAVSGFSITTTGYHW |
| NO: | scFv | | NWVRQAPGKGLEWVGYIYSSGSTSYNPSLKSRFTIS |
| 7406 | | | RDTSKNTFYLQMNSLRAEDTAVYYCARGDWHYFD |
| | | | YWGQGTMVTVSSGGGGSGGGGSGGGGSGGGGSDS |
| | | | VTTQSPLSLPVTLGQPASISCSGEKLSDKYVHWYQQ |
| | | | RPGQSPRMLIYENDRRPSGVPDRFSGSNSGNDATLKI |
| | | | SRVEAEDVGVYFCQFWDSTASAVFGGGTKVEIK |
| SEQ ID | BKM0139 | | EIQLLESGGGLVQPGGSLRLSCAVSGFSITTTGYHW |
| NO: | scFv | | NWVRQAPGKGLEWVGYIYSSGSTSYNPSLKSRFTIS |
| 7407 | | | RDTSKNTFYLQMNSLRAEDTAVYYCARGDWHYFD |
| | | | YWGQGTMVTVSSGGGGSGGGGSGGGGSGGGGSDS |
| | | | VTTQSPLSLPVTLGQPASISCSGEKLSDKYVHWYQQ |
| | | | RPGQSPRMLIYENDRRPSGVPDRFSGSNSGNDATLKI |
| | | | SRVEAEDVGVYFCQFWASTNSAVFGGGTKVEIK |
| SEQ ID | BKM0140 | | EIQLLESGGGLVQPGGSLRLSCAVSGFSITTTGYHW |
| NO: | scFv | | NWVRQAPGKGLEWVGYIYSSGSTSYNPSLKSRFTIS |
| 7408 | | | RDTSKNTFYLQMNSLRAEDTAVYYCARGDWHYFD |
| | | | YWGQGTMVTVSSGGGGSGGGGSGGGGSGGGGSSS |
| | | | ETTQPPSVSVSPGQTASITCSGEKLSDKYVHWYQQK |
| | | | PGQSPVMVIYENDRRPSGIPERFSGSNSGNTATLTIS |
| | | | GTQAMDEADYFCQFWASTNSAVFGGGTQLTVL |
| SEQ ID | BKM0141 | | EIQLLESGGGLVQPGGSLRLSCAVSGFSITTTGYHW |
| NO: | scFv | | NWVRQAPGKGLEWVGYIYSSGSTSYNPSLKSRFTIS |
| 7409 | | | RDTSKNTFYLQMNSLRAEDTAVYYCARGDWHYFD |
| | | | YWGQGTMVTVSSGGGGSGGGGSGGGGSGGGGSSS |
| | | | ETTQPPSVSVSPGQTASITCSGEKLSDKYVHWYQQK |
| | | | PGQSPVMVIYENDRRPSGIPERFSGSNSGNTATLTIS |
| | | | GTQAMDEADYFCQFWDSTASAVFGGGTQLTVL |
| SEQ ID | BKM0142 | | EIQLLESGGGLVQPGGSLRLSCAVSGFSITTTGYHW |
| NO: | scFv | | NWVRQAPGKGLEWVGYIYSSGSTSYAPSLKSRFTIS |
| 7411 | | | RDTSKNTFYLQMNSLRAEDTAVYYCARGDWHYFD |
| | | | YWGQGTMVTVSSGGGGSGGGGSGGGGSGGGGSDS |
| | | | VTTQSPLSLPVTLGQPASISCSGEKLSDKYVHWYQQ |
| | | | RPGQSPRMLIYENDRRPSGVPDRFSGSNSGNDATLKI |
| | | | SRVEAEDVGVYFCQFWDSTNSAVFGGGTKVEIK |
| SEQ ID | BKM0143 | | EIQLLESGGGLVQPGGSLRLSCAVSGFSITTTGYHW |
| NO: | scFv | | NWVRQAPGKGLEWVGYIYSSGSTSYAPSLKSRFTIS |
| 7412 | | | RDTSKNTFYLQMNSLRAEDTAVYYCARGDWHYFD |
| | | | YWGQGTMVTVSSGGGGSGGGGSGGGGSGGGGSSS |
| | | | ETTQPPSVSVSPGQTASITCSGEKLSDKYVHWYQQK |
| | | | PGQSPVMVIYENDRRPSGIPERFSGSNSGNTATLTIS |
| | | | GTQAMDEADYFCQFWDSTNSAVFGGGTQLTVL |
| SEQ ID | BKM0144 | | EIQLLESGGGLVQPGGSLRLSCAVSGFSITTTGYHW |
| NO: | scFv | | NWVRQAPGKGLEWVGYIYSSGSTSYAPSLKSRFTIS |
| 7413 | | | RDTSKNTFYLQMNSLRAEDTAVYYCARGDWHYFD |
| | | | YWGQGTMVTVSSGGGGSGGGGSGGGGSGGGGSDS |
| | | | VTTQSPLSLPVTLGQPASISCSGEKLSDKYVHWYQQ |
| | | | RPGQSPRMLIYENDRRPSGVPDRFSGSNSGNDATLKI |
| | | | SRVEAEDVGVYFCQFWASTASAVFGGGTKVEIK |
| SEQ ID | BKM0145 | | EIQLLESGGGLVQPGGSLRLSCAVSGFSITTTGYHW |
| NO: | scFv | | NWVRQAPGKGLEWVGYIYSSGSTSYAPSLKSRFTIS |
| 7414 | | | RDTSKNTFYLQMNSLRAEDTAVYYCARGDWHYFD |
| | | | YWGQGTMVTVSSGGGGSGGGGSGGGGSGGGGSSS |
| | | | ETTQPPSVSVSPGQTASITCSGEKLSDKYVHWYQQK |
| | | | PGQSPVMVIYENDRRPSGIPERFSGSNSGNTATLTIS |
| | | | GTQAMDEADYFCQFWASTASAVFGGGTQLTVL |

[0751] In some embodiments, the NK cell engager is an antigen binding domain that binds to NKp46 (e.g., NKp46 present, e.g., expressed or displayed, on the surface of an NK cell) and comprises any CDR amino acid sequence, framework region (FWR) amino acid sequence, or variable region amino acid sequence disclosed in Table 15. In some embodiments, binding of the NK cell engager, e.g., antigen binding domain that binds to NKp46, to the NK cell activates the NK cell. An antigen binding domain that binds to NKp46 (e.g., NKp46 present, e.g., expressed or displayed, on the surface of an NK cell) may be said to target NKp46, the NK cell, or both.

[0752] In some embodiments, the NK cell engager is an antigen binding domain that binds to NKG2D (e.g., NKG2D present, e.g., expressed or displayed, on the surface of an NK cell) and comprises any CDR amino acid sequence, framework region (FWR) amino acid sequence, or variable region amino acid sequence disclosed in Table 15. In some embodiments, binding of the NK cell engager, e.g., antigen binding domain that binds to NKG2D, to the NK cell activates the NK cell. An antigen binding domain that binds to NKG2D (e.g., NKG2D present, e.g., expressed or displayed, on the surface of an NK cell) may be said to target NKG2D, the NK cell, or both. 006851 In some embodiments, the NK cell engager is an antigen binding domain that binds to CD16 (e.g., CD16 present, e.g., expressed or displayed, on the surface of an NK cell) and comprises any CDR amino acid sequence, framework region (FWR) amino acid sequence, or variable region amino acid sequence disclosed in Table 15. In some embodiments, binding of the NK cell engager, e.g., antigen binding domain that binds to CD16, to the NK cell activates the NK cell. An antigen binding domain that binds to CD16 (e.g., CD16 present, e.g., expressed or displayed, on the surface of an NK cell) may be said to target CD16, the NK cell, or both.

TABLE 15
Exemplary variable regions of NKp46, NKG2D, or CD16-targeting antigen binding
domains

| SEQ | | | |
|---|---|---|---|
| ID NO | Ab ID | Description | Sequence |
| SEQ | NKG2D_ | scFv that binds | QVHLQESGPGLVKPSETLSLTCTVSDDSISSYYWSWIR |
| ID NO: | 1scFv | NKG2D | QPPGKGLEWIGHISYSGSANYNPSLKSRVTISVDTSKNQ |
| 6175 | | | FSLKLSSVTAADTAVYYCANWDDAFNIWGQGTMVTV |
| | | | SSGGGGSGGGGSGGGGSGGGGSEIVLTQSPGTLSLSPG |
| | | | ERATLSCRASQSVSSSYLAWYQQKPGQAPRLLIYGASS |
| | | | RATGIPDRFSGSGSGTDFTLTISRLEPEDFAVYYCQQYG |
| | | | SSPWTFGQGTKVEIK |
| SEQ | NKG2D_ | VH that binds | QVHLQESGPGLVKPSETLSLTCTVSDDSISSYYWSWIR |
| ID NO: | 1VH | NKG2D | QPPGKGLEWIGHISYSGSANYNPSLKSRVTISVDTSKNQ |
| 6176 | | | FSLKLSSVTAADTAVYYCANWDDAFNIWGQGTMVTV |
| | | | SS |
| SEQ | NKG2D_ | VL that binds | EIVLTQSPGTLSLSPGERATLSCRASQSVSSSYLAWYQQ |
| ID NO: | 1VL | NKG2D | KPGQAPRLLIYGASSRATGIPDRFSGSGSGTDFTLTISRL |
| 6177 | | | EPEDFAVYYCQQYGSSPWTFGQGTKVEIK |
| SEQ | NKG2D_ | scFv that binds | EVQLVQSGAEVKEPGESLKISCKNSGYSFTNYWVGWV |
| ID NO: | 2scFv | NKG2D | RQMPGKGLEWMGIIYPGDSDTRYSPSFQGQVTISADKS |
| 6178 | | | INTAYLQWSSLKASDTAMYYCGRLTMFRGIIIGYFDY |
| | | | WGQGTLVTVSSGGGGSGGGGSGGGGSGGGGSEIVLTQ |
| | | | SPATLSLSPGERATLSCRASQSVSSYLAWYQQKPGQAP |
| | | | RLLIYDASNRATGIPARFSGSGSGTDFTLTISSLEPEDFA |
| | | | VYYCQQRSNWPWTFGQGTKVEIK |
| SEQ | NKG2D_ | VH that binds | EVQLVQSGAEVKEPGESLKISCKNSGYSFTNYWVGWV |
| ID NO: | 2VH | NKG2D | RQMPGKGLEWMGIIYPGDSDTRYSPSFQGQVTISADKS |
| 6179 | | | INTAYLQWSSLKASDTAMYYCGRLTMFRGIIIGYFDY |
| | | | WGQGTLVTVSS |
| SEQ | NKG2D_ | VL that binds | EIVLTQSPATLSLSPGERATLSCRASQSVSSYLAWYQQ |
| ID NO: | 2VL | NKG2D | KPGQAPRLLIYDASNRATGIPARFSGSGSGTDFTLTISSL |
| 6180 | | | EPEDFAVYYCQQRSNWPWTFGQGTKVEIK |
| SEQ | NKp46 | scFv that binds | QVQLQQSGPELVKPGASVKMSCKASGYTFTDYVINWG |
| ID NO: | scFv | NKp46 | KQRSGQGLEWIGEIYPGSGTNYYNEKFKAKATLTADK |
| 6181 | | | SSNIAYMQLSSLTSEDSAVYFCARRGRYGLYAMDYWG |
| | | | QGTSVTVSSGGGGGGGGSGGGGSGGGGSDIQMTQTT |
| | | | SSLSASLGDRVTISCRASQDISNYLNWYQQKPDGTVKL |
| | | | LIYYTSRLHSGVPSRFSGSGSGTDYSLTINNLEQEDIAT |
| | | | YFCQQGNTRPWTFGGGTKLEIK |
| SEQ | NKp46 | VH that binds | QVQLQQSGPELVKPGASVKMSCKASGYTFTDYVINWG |
| ID NO: | VH | NKp46 | KQRSGQGLEWIGEIYPGSGTNYYNEKFKAKATLTADK |
| 6182 | | | SSNIAYMQLSSLTSEDSAVYFCARRGRYGLYAMDYWG |
| | | | QGTSVTVSS |
| SEQ | NKp46 | VL that binds | DIQMTQTTSSLSASLGDRVTISCRASQDISNYLNWYQQ |
| ID NO: | VL | NKp46 | KPDGTVKLLIYYTSRLHSGVPSRFSGSGSGTDYSLTINN |
| 6183 | | | LEQEDIATYFCQQGNTRPWTFGGGTKLEIK |
| SEQ | CD16 | scFv that binds | EVQLVESGG GVVRPGGSLR LSCAASGFTF |
| ID NO: | scFv | CD16 | DDYGMSWVRQ APGKGLEWVS |
| 6184 | | | GINWNGGSTG YADSVKGRFT ISRDNAKNSL |
| | | | YLQMNSLRAE DTAVYYCARG |
| | | | RSLLFDYWGQ GTLVTVSRGG GGSGGGGSGG |
| | | | GGSSELTQDP AVSVALGQTV |
| | | | RITCQGDSLR SYYASWYQQK PGQAPVLVIY |
| | | | GKNNRPSGIP DRFSGSSSGN |
| | | | TASLTITGAQ AEDEADYYCN SRDSSGNHVV |
| | | | FGGGTKLTVL |
| SEQ | CD16V | VH that binds | EVQLVESGG GVVRPGGSLR LSCAASGFTF |
| ID NO: | H | CD16 | DDYGMSWVRQ APGKGLEWVS |
| 6185 | | | GINWNGGSTG YADSVKGRFT ISRDNAKNSL |
| | | | YLQMNSLRAE DTAVYYCARG |
| | | | RSLLFDYWGQ GTLVTVSR |
| SEQ | CD16V | VL that binds | SSELTQDP AVSVALGQTVRITCQGDSLR |
| ID NO: | L | CD16 | SYYASWYQQK PGQAPVLVIY GKNNRPSGIP |
| 6186 | | | DRFSGSSSGNTASLTITGAQ AEDEADYYCN |
| | | | SRDSSGNHVV FGGGTKLTVL |

[0753] In one embodiment, the NK cell engager is a ligand of NKp30, e.g., is a B37-6, e.g., comprises the amino acid sequence of:

(SEQ ID NO: 6198)
DLKVEMMAGGTQITPLNDNVTIFCNIFYSQPLNITSMGITWFWKSLTFD
KEVKVFEFFGDHQEAFRPGAIVSPWRLKSGDASLRLPGIQLEEAGEYRC
EVVVTPLKAQGTVQLEVVASPASRLLLDQVGMKENEDKYMCESSGFYPE
AINITWEKQTQKFPHPIEISEDVITGPTIKNMDGTFNVTSCLKLNSSQE
DPGTVYQCVVRHASLHTPLRSNFTLTAARHSLSETEKTDNFS,

a fragment thereof, or an amino acid sequence substantially identical thereto (e.g., 95% to 99.9% identical thereto, or having at least one amino acid alteration, but not more than five, ten or fifteen alterations (e.g., substitutions, deletions, or insertions, e.g., conservative substitutions) to the amino acid sequence of SEQ ID NO: 6198.

[0754] In other embodiments, the NK cell engager is a ligand of NKp44 or NKp46, which is a viral HA. Viral hemagglutinins (HA) are glyco proteins which are on the surface of viruses. HA proteins allow viruses to bind to the membrane of cells via sialic acid sugar moieties which contributes to the fusion of viral membranes with the cell membranes (see e.g., Eur J Immunol. 2001 Sep.; 31(9):2680-9 “Recognition of viral hemagglutinins by NKp44 but not by NKp30”; and Nature. 2001 Feb. 22; 409(6823):1055-60 “Recognition of haemagglutinins on virus-infected cells by NKp46 activates lysis by human NK cells” the contents of each of which are incorporated by reference herein).

[0755] In other embodiments, the NK cell engager is a ligand of NKG2D chosen from MICA, MICB, or ULBP1, e.g., wherein:

(i) MICA comprises the amino acid sequence:

(SEQ ID NO: 6199)
EPHSLRYNLTVLSWDGSVQSGFLTEVHLDGQPFLRCDRQKCRAKPQGQW
AEDVLGNKTWDRETRDLTGNGKDLRMTLAHIKDQKEGLHSLQEIRVCEI
HEDNSTRSSQHFYYDGELFLSQNLETKEWTMPQSSRAQTLAMNVRNFLK
EDAMKTKTHYHAMHADCLQELRRYLKSGVVLRRTVPPMVNVTRSEASEG
NITVTCRASGFYPWNITLSWRQDGVSLSHDTQQWGDVLPDGNGTYQTWV
ATRICQGEEQRFTCYMEHSGNHSTHPVPSGKVLVLQSHW,

a fragment thereof, or an amino acid sequence substantially identical thereto (e.g., 95% to 99.9% identical thereto, or having at least one amino acid alteration, but not more than five, ten or fifteen alterations (e.g., substitutions, deletions, or insertions, e.g., conservative substitutions) to the amino acid sequence of SEQ ID NO: 6199;
[0756] (ii) MICB comprises the amino acid sequence:

(SEQ ID NO: 6200)
AEPHSLRYNLMVLSQDESVQSGFLAEGHLDGQPFLRYDRQKRRAKPQGQ
WAEDVLGAKTWDTETEDLTENGQDLRRTLTHIKDQKGGLHSLQEIRVCE
IHEDSSTRGSRHFYYDGELFLSQNLETQESTVPQSSRAQTLAMNVTNFW
KEDAMKTKTHYRAMQADCLQKLQRYLKSGVAIRRTVPPMVNVTCSEVSE
GNITVTCRASSFYPRNITLTWRQDGVSLSHNTQQWGDVLPDGNGTYQTW
VATRIRQGEEQRFTCYMEHSGNHGTHPVPSGKVLVLQSQRTD,

a fragment thereof, or an amino acid sequence substantially identical thereto (e.g., 95% to 99.9% identical thereto, or having at least one amino acid alteration, but not more than five, ten or fifteen alterations (e.g., substitutions, deletions, or insertions, e.g., conservative substitutions) to the amino acid sequence of SEQ ID NO: 6200; or
[0757] (iii) ULBP1 comprises the amino acid sequence:

(SEQ ID NO: 6201)
GWVDTHCLCYDFIITPKSRPEPQWCEVQGLVDERPFLHYDCVNHKAKAF
ASLGKKVNVTKTWEEQTETLRDVVDFLKGQLLDIQVENLIPIEPLTLQA
RMSCEHEAHGHGRGSWQFLFNGQKFLLFDSNNRKWTALHPGAKKMTEKW
EKNRDVTMFFQKISLGDCKMWLEEFLMYWEQMLDPTKPPSLAPG,

a fragment thereof, or an amino acid sequence substantially identical thereto (e.g., 95% to 99.9% identical thereto, or having at least one amino acid alteration, but not more than five, ten or fifteen alterations (e.g., substitutions, deletions, or insertions, e.g., conservative substitutions) to the amino acid sequence of SEQ ID NO: 6201.

[0758] In other embodiments, the NK cell engager is a ligand of DNAM1 chosen from NECTIN2 or NECL5, e.g., wherein:
[0759] (i) NECTIN2 comprises the amino acid sequence:

(SEQ ID NO: 6202)
QDVRVQVLPEVRGQLGGTVELPCHLLPPVPGLYISLVTWQRPDAPANHQ
NVAAFHPKMGPSFPSPKPGSERLSFVSAKQSTGQDTEAELQDATLALHG
LTVEDEGNYTCEFATFPKGSVRGMTWLRVIAKPKNQAEAQKVTFSQDPT
TVALCISKEGRPPARISWLSSLDWEAKETQVSGTLAGTVTVTSRFTLVP
SGRADGVTVTCKVEHESFEEPALIPVTLSVRYPPEVSISGYDDNWYLGR
TDATLSCDVRSNPEPTGYDWSTTSGTFPTSAVAQGSQLVIHAVDSLFNT
TFVCTVTNAVGMGRAEQVIFVRETPNTAGAGATGG,

a fragment thereof, or an amino acid sequence substantially identical thereto (e.g., 95% to 99.9% identical thereto, or having at least one amino acid alteration, but not more than five, ten or fifteen alterations (e.g., substitutions, deletions, or insertions, e.g., conservative substitutions) to the amino acid sequence of SEQ ID NO: 6202; or
[0760] (ii) NECL5 comprises the amino acid sequence:

(SEQ ID NO: 6203)
WPPPGTGDVVVQAPTQVPGFLGDSVTLPCYLQVPNMEVTHVSQLTWARH
GESGSMAVFHQTQGPSYSESKRLEFVAARLGAELRNASLRMFGLRVEDE
GNYTCLFVTFPQGSRSVDIWLRVLAKPQNTAEVQKVQLTGEPVPMARCV
STGGRPPAQITWHSDLGGMPNTSQVPGFLSGTVTVTSLWILVPSSQVDG
KNVTCKVEHESFEKPQLLTVNLTVYYPPEVSISGYDNNWYLGQNEATLT
CDARSNPEPTGYNWSTTMGPLPPFAVAQGAQLLIRPVDKPINTTLICNV
TNALGARQAELTVQVKEGPPSEHSGISRN,

a fragment thereof, or an amino acid sequence substantially identical thereto (e.g., 95% to 99.9% identical thereto, or having at least one amino acid alteration, but not more than five, ten or fifteen alterations (e.g., substitutions, deletions, or insertions, e.g., conservative substitutions) to the amino acid sequence of SEQ ID NO: 6203.

[0761] In yet other embodiments, the NK cell engager is a ligand of DAP10, which is an adapter for NKG2D (see e.g., Proc Natl Acad Sci USA. 2005 May 24; 102(21): 7641-7646; and Blood, 15 Sep. 2011 Volume 118, Number 11, the full contents of each of which is incorporated by reference herein).

[0762] In other embodiments, the NK cell engager is a ligand of CD16, which is a CD16a/b ligand, e.g., a CD16a/b ligand further comprising an antibody Fc region (see e.g., Front Immunol. 2013; 4: 76 discusses how antibodies use the Fc to trigger NK cells through CD16, the full contents of which are incorporated herein).

[0763] In other embodiments, the NK cell engager is a ligand of CRTAM, which is NECL2, e.g., wherein NECL2 comprises the amino acid sequence:

(SEQ ID NO: 6204)
QNLFTKDVTVIEGEVATISCQVNKSDDSVIQLLNPNRQTIYFRDFRPLK
DSRFQLLNFSSSELKVSLTNVSISDEGRYFCQLYTDPPQESYTTITVLV
PPRNLMIDIQKDTAVEGEEIEVNCTAMASKPATTIRWFKGNTELKGKSE
VEEWSDMYTVTSQLMLKVHKEDDGVPVICQVEHPAVTGNLQTQRYLEVQ
YKPQVHIQMTYPLQGLTREGDALELTCEAIGKPQPVMVTWVRVDDEMPQ
HAVLSGPNLFINNLNKTDNGTYRCEASNIVGKAHSDYMLYVYDPPTTIP
PPTTTTTTTTTTTTTILTIITDSRAGEEGSIRAVDH,

a fragment thereof, or an amino acid sequence substantially identical thereto (e.g., 95% to 99.9% identical thereto, or having at least one amino acid alteration, but not more than five, ten or fifteen alterations (e.g., substitutions, deletions, or insertions, e.g., conservative substitutions) to the amino acid sequence of SEQ ID NO: 6204.

[0764] In other embodiments, the NK cell engager is a ligand of CD27, which is CD70, e.g., wherein CD70 comprises the amino acid sequence:

(SEQ ID NO: 6205)
QRFAQAQQQLPLESLGWDVAELQLNHTGPQQDPRLYWQGGPALGRSFLH
GPELDKGQLRIHRDGIYMVHIQVTLAICSSTTASRHHPTTLAVGICSPA
SRSISLLRLSFHQGCTIASQRLTPLARGDTLCTNLTGTLLPSRNTDETF
FGVQWVRP,

a fragment thereof, or an amino acid sequence substantially identical thereto (e.g., 95% to 99.9% identical thereto, or having at least one amino acid alteration, but not more than five, ten or fifteen alterations (e.g., substitutions, deletions, or insertions, e.g., conservative substitutions) to the amino acid sequence of SEQ ID NO: 6205.

[0765] In other embodiments, the NK cell engager is a ligand of PSGL1, which is L-selectin (CD62L), e.g., wherein L-selectin comprises the amino acid sequence:

(SEQ ID NO: 6206)
WTYHYSEKPMNWQRARRFCRDNYTDLVAIQNKAEIEYLEKTLPFSRSYY
WIGIRKIGGIWTWVGTNKSLTEEAENWGDGEPNNKKNKEDCVEIYIKRN
KDAGKWNDDACHKLKAALCYTASCQPWSCSGHGECVEIINNYTCNCDVG
YYGPQCQFVIQCEPLEAPELGTMDCTHPLGNFSFSSQCAFSCSEGTNLT
GIEETTCGPFGNWSSPEPTCQVIQCEPLSAPDLGIMNCSHPLASFSFTS
ACTFICSEGTELIGKKKTICESSGIWSNPSPICQKLDKSFSMIKEGDY
N,

a fragment thereof, or an amino acid sequence substantially identical thereto (e.g., 95% to 99.9% identical thereto, or having at least one amino acid alteration, but not more than five, ten or fifteen alterations (e.g., substitutions, deletions, or insertions, e.g., conservative substitutions) to the amino acid sequence of SEQ ID NO: 6206.

[0766] In other embodiments, the NK cell engager is a ligand of CD96, which is NECL5, e.g., wherein NECL5 comprises the amino acid sequence:

(SEQ ID NO: 6203)
WPPPGTGDVVVQAPTQVPGFLGDSVTLPCYLQVPNMEVTHVSQLTWARH
GESGSMAVFHQTQGPSYSESKRLEFVAARLGAELRNASLRMFGLRVEDE
GNYTCLFVTFPQGSRSVDIWLRVLAKPQNTAEVQKVQLTGEPVPMARCV
STGGRPPAQITWHSDLGGMPNTSQVPGFLSGTVTVTSLWILVPSSQVDG
KNVTCKVEHESFEKPQLLTVNLTVYYPPEVSISGYDNNWYLGQNEATLT
CDARSNPEPTGYNWSTTMGPLPPFAVAQGAQLLIRPVDKPINTTLICNV
TNALGARQAELTVQVKEGPPSEHSGISRN,

a fragment thereof, or an amino acid sequence substantially identical thereto (e.g., 95% to 99.9% identical thereto, or having at least one amino acid alteration, but not more than five, ten or fifteen alterations (e.g., substitutions, deletions, or insertions, e.g., conservative substitutions) to the amino acid sequence of SEQ ID NO: 6203 or 6204.

[0767] In other embodiments, the NK cell engager is a ligand of CD100 (SEMA4D), which is CD72, e.g., wherein CD72 comprises the amino acid sequence:

(SEQ ID NO: 6207)
RYLQVSQQLQQTNRVLEVINSSLRQQLRLKITQLGQSAEDLQGSRRELA
QSQEALQVEQRAHQAAEGQLQACQADRQKTKETLQSEEQQRRALEQKLS
NMENRLKPFFTCGSADTCCPSGWIMHQKSCFYISLTSKNWQESQKQCET
LSSKLATFSEIYPQSHSYYFLNSLLPNGGSGNSYWTGLSSNKDWKLTDD
TQRTRTYAQSSKCNKVHKTWSWWTLESESCRSSLPYICEMTAFRFPD,

a fragment thereof, or an amino acid sequence substantially identical thereto (e.g., 95% to 99.9% identical thereto, or having at least one amino acid alteration, but not more than five, ten or fifteen alterations (e.g., substitutions, deletions, or insertions, e.g., conservative substitutions) to the amino acid sequence of SEQ ID NO: 6207.

[0768] In other embodiments, the NK cell engager is a ligand of NKp80, which is CLEC2B (AICL), e.g., wherein CLEC2B (AICL) comprises the amino acid sequence:

(SEQ ID NO: 6208)
KLTRDSQSLCPYDWIGFQNKCYYFSKEEGDWNSSKYNCSTQHADLTIID
NIEEMNFLRRYKCSSDHWIGLKMAKNRTGQWVDGATFTKSFGMRGSEGC
AYLSDDGAATARCYTERKWICRKRIH,

a fragment thereof, or an amino acid sequence substantially identical thereto (e.g., 95% to 99.9% identical thereto, or having at least one amino acid alteration, but not more than five, ten or fifteen alterations (e.g., substitutions, deletions, or insertions, e.g., conservative substitutions) to the amino acid sequence of SEQ ID NO: 6208.

[0769] In other embodiments, the NK cell engager is a ligand of CD244, which is CD48, e.g., wherein CD48 comprises the amino acid sequence:

(SEQ ID NO: 6209)
QGHLVHMTVVSGSNVTLNISESLPENYKQLTWFYTFDQKIVEWDSRKSK
YFESKFKGRVRLDPQSGALYISKVQKEDNSTYIMRVLKKTGNEQEWKIK
LQVLDPVPKPVIKIEKIEDMDDNCYLKLSCVIPGESVNYTWYGDKRPFP
KELQNSVLETTLMPHNYSRCYTCQVSNSVSSKNGTVCLSPPCTLARS,

a fragment thereof, or an amino acid sequence substantially identical thereto (e.g., 95% to 99.9% identical thereto, or having at least one amino acid alteration, but not more than five, ten or fifteen alterations (e.g., substitutions, deletions, or insertions, e.g., conservative substitutions) to the amino acid sequence of SEQ ID NO: 6209.

[0770] In some embodiments, the NK cell engager is a viral hemagglutinin (HA), HA is a glycoprotein found on the surface of influenza viruses. It is responsible for binding the virus to cells with sialic acid on the membranes, such as cells in the upper respiratory tract or erythrocytes. HA has at least 18 different antigens. These subtypes are named H1 through H18. NCRs can recognize viral proteins. NKp46 has been shown to be able to interact with the HA of influenza and the HA-NA of Paramyxovirus, including Sendai virus and Newcastle disease virus. Besides NKp46, NKp44 can also functionally interact with HA of different influenza subtypes.

[0771] In some embodiments of any of the multifunctional molecules described herein, the immune cell engager is an NK cell engager, e.g., an NK cell engager that mediates binding to and activation of an NK cell, or an NK cell engager that mediates binding to but not activation of an NK cell. In certain embodiments, the NK cell engager is chosen from an antibody molecule, e.g., an antigen binding domain, or ligand that binds to (e.g., activates): NKp30, NKp40, NKp44, NKp46, NKG2D, DNAM1, DAP10, CD16 (e.g., CD16a, CD16b, or both), CRTAM, CD27, PSGL1, CD96, CD100 (SEMA4D), NKp80, CD244 (also known as SLAMF4 or 2B4), SLAMF6, SLAMF7, KIR2DS2, KIR2DS4, KIR3DS1, KIR2DS3, KIR2DS5, KIR2DS1, CD94, NKG2C, NKG2E, or CD160, e.g., the NK cell engager is an antibody molecule or ligand that binds to (e.g., activates) NKp30. In certain some embodiments, the NK cell engager is an antibody molecule, e.g., an antigen binding domain.

[0772] In some embodiments, the NK cell engager is capable of engaging an NK cell.

[0773] In some embodiments, the NK cell engager is an antibody molecule, e.g., an antigen binding domain, that binds to NKp30, NKp46, NKG2D, or CD16.

[0774] In some embodiments, the multifunctional molecule:
[0775] (i) binds specifically to an epitope of NKp30, NKp46, NKG2D, or CD16, e.g., the same or similar epitope as the epitope recognized by an anti-NKp30, anti-NKp46, anti-NKG2D, or anti-CD16 antibody molecule as described herein;
[0776] (ii) shows the same or similar binding affinity or specificity, or both, as an anti-NKp30, anti-NKp46, anti-NKG2D, or anti-CD16 antibody molecule as described herein;
[0777] (iii) inhibits, e.g., competitively inhibits, the binding of an anti-NKp30, anti-NKp46, anti-NKG2D, or anti-CD16 antibody molecule as described herein;
[0778] (iv) binds the same or an overlapping epitope with an anti-NKp30, anti-NKp46, anti-NKG2D, or anti-CD16 antibody molecule as described herein; or
[0779] (v) competes for binding, and/or binds the same epitope, with an anti-NKp30, anti-NKp46, anti-NKG2D, or anti-CD16 molecule as described herein.

[0780] In some embodiments, the anti-NKp30, anti-NKp46, anti-NKG2D, or anti-CD16 antibody molecule comprises one or more CDRs, framework regions, variable domains, heavy or light chains, or an antigen binding domain chosen from Tables 7, 8, 35, 36, 9, 10, 15, or 34, or a sequence substantially identical thereto. In some embodiments, the NK cell engager is an antibody molecule, e.g., an antigen binding domain, that binds to NKp30. In some embodiments, lysis of the lymphoma cell or lymphocyte is mediated by NKp30. In some embodiments, the multifunctional molecule does not activate the NK cell when incubated with the NK cell in the absence of the tumor antigen on the lymphoma cell or TRBC1 or TRBC2 on the lymphocyte. In some embodiments, the multifunctional molecule activates the NK cell when the NK cell is a NKp30 expressing NK cell and either: (1) the tumor antigen on the lymphoma cell is also present or (2) TRBC1 or TRBC2 on the lymphocyte is also present. In some embodiments, the multifunctional molecule does not activate the NK cell when the NK cell is not a NKp30 expressing NK cell and either: (1) the tumor antigen on the lymphoma cell is also present or (2) TRBC1 or TRBC2 on the lymphocyte is also present.

[0781] In some embodiments, the NK cell engager comprises:
[0782] (i) a heavy chain variable region (VH) comprising a heavy chain complementarity determining region 1 (VHCDR1) amino acid sequence of SEQ ID NO: 6000 (or a sequence with no more than 1, 2, 3, or 4 mutations, e.g., substitutions, additions, or deletions), a VHCDR2 amino acid sequence of SEQ ID NO: 6001 (or a sequence with no more than 1, 2, 3, or 4 mutations, e.g., substitutions, additions, or deletions), and/or a VHCDR3 amino acid sequence of SEQ ID NO: 6002 (or a sequence with no more than 1, 2, 3, or 4 mutations, e.g., substitutions, additions, or deletions), and
[0783] (ii) a light chain variable region (VL) comprising a light chain complementarity determining region 1 (VLCDR1) amino acid sequence of SEQ ID NO: 6063 (or a sequence with no more than 1, 2, 3, or 4 mutations, e.g., substitutions, additions, or deletions), a VLCDR2 amino acid sequence of SEQ ID NO: 6064 (or a sequence with no more than 1, 2, 3, or 4 mutations, e.g., substitutions, additions, or deletions), and/or a VLCDR3 amino acid sequence of SEQ ID NO: 7293 (or a sequence with no more than 1, 2, 3, or 4 mutations, e.g., substitutions, additions, or deletions).

[0784] In some embodiments, the NK cell engager comprises:
[0785] (i) a heavy chain variable region (VH) comprising a heavy chain complementarity determining region 1 (VHCDR1) amino acid sequence of SEQ ID NO: 6000, a VHCDR2 amino acid sequence of SEQ ID NO: 6001, and/or a VHCDR3 amino acid sequence of SEQ ID NO: 6002, and
[0786] (ii) a light chain variable region (VL) comprising a light chain complementarity determining region 1 (VLCDR1) amino acid sequence of SEQ ID NO: 6063, a VLCDR2 amino acid sequence of SEQ ID NO: 6064, and/or a VLCDR3 amino acid sequence of SEQ ID NO: 7293.

[0787] In some embodiments, the NK cell engager comprises: (1) a heavy chain variable region (VH) comprising a heavy chain framework region 1 (VHFWR1) amino acid sequence of SEQ ID NO: 6003 (or a sequence with no more than 1, 2, 3, 4, 5, or 6 mutations, e.g., substitutions, additions, or deletions, therefrom), a VHFWR2 amino acid sequence of SEQ ID NO: 6004 (or a sequence with no more than 1, 2, 3, 4, 5, or 6 mutations, e.g., substitutions, additions, or deletions, therefrom), a VHFWR3 amino acid sequence of SEQ ID NO: 6005 (or a sequence with no more than 1, 2, 3, 4, 5, or 6 mutations, e.g., substitutions, additions, or deletions, therefrom), or a VHFWR4 amino acid sequence of SEQ ID NO: 6006 (or a sequence with no more than 1, 2, 3, 4, 5, or 6 mutations, e.g., substitutions, additions, or deletions, therefrom), and/or (2) a light chain variable region (VL) comprising a light chain framework region 1 (VLFWR1) amino acid sequence of SEQ ID NO: 6066 (or a sequence with no more than 1, 2, 3, 4, 5, or 6 mutations, e.g., substitutions, additions, or deletions, therefrom), a VLFWR2 amino acid sequence of SEQ ID NO: 6067 (or a sequence with no more than 1, 2, 3, 4, 5, or 6 mutations, e.g., substitutions, additions, or deletions, therefrom), a VLFWR3 amino acid sequence of SEQ ID NO: 7292 (or a sequence with no more than 1, 2, 3, 4, 5, or 6 mutations, e.g., substitutions, additions, or deletions, therefrom), or a VLFWR4 amino acid sequence of SEQ ID NO: 6069 (or a sequence with no more than 1, 2, 3, 4, 5, or 6 mutations, e.g., substitutions, additions, or deletions, therefrom).

[0788] In some embodiments, the NK cell engager comprises:
[0789] (1) a heavy chain variable region (VH) comprising a heavy chain framework region 1 (VHFWR1) amino acid sequence of SEQ ID NO: 6003, a VHFWR2 amino acid sequence of SEQ ID NO: 6004, a VHFWR3 amino acid sequence of SEQ ID NO: 6005, or a VHFWR4 amino acid sequence of SEQ ID NO: 6006, and
[0790] (3) a light chain variable region (VL) comprising a light chain framework region 1 (VLFWR1) amino acid sequence of SEQ ID NO: 6066, a VLFWR2 amino acid sequence of SEQ ID NO: 6067, a VLFWR3 amino acid sequence of SEQ ID NO: 7292, or a VLFWR4 amino acid sequence of SEQ ID NO: 6069.

[0791] In some embodiments, the NK cell engager comprises:
[0792] (i) a VH comprising the amino acid sequence of SEQ ID NO: 6121 (or an amino acid sequence having at least about 75%, 80%, 85%, 90%, 95%, or 99% sequence identity to SEQ ID NO: 6121), and/or
[0793] (ii) a VL comprising the amino acid sequence of SEQ ID NO: 7294 (or an amino acid sequence having at least about 93%, 95%, or 99% sequence identity to SEQ ID NO: 7294).

[0794] In some embodiments, the NK cell engager comprises a heavy chain comprising the amino acid sequence of SEQ ID NOs: 6148 or 6149 (or an amino acid sequence having at least about 75%, 80%, 85%, 90%, 95%, or 99% sequence identity to SEQ ID NOs: 6148 or 6149).

[0795] In some embodiments, the NK cell engager comprises a light chain comprising the amino acid sequence of SEQ ID NO: 6150 (or an amino acid sequence having at least about 75%, 80%, 85%, 90%, 95%, or 99% sequence identity to SEQ ID NO: 6150).

[0796] In some embodiments, the NK cell engager comprises a heavy chain comprising the amino acid sequence of SEQ ID NOs: 6148 or 6149 (or an amino acid sequence having at least about 75%, 80%, 85%, 90%, 95%, or 99% sequence identity to SEQ ID NOs: 6148 or 6149), and a light chain comprising the amino acid sequence of SEQ ID NO: 6150 (or an amino acid sequence having at least about 75%, 80%, 85%, 90%, 95%, or 99% sequence identity to SEQ ID NO: 6150).

[0797] In some embodiments, the NK cell engager comprises a heavy chain variable region (VH) comprising a heavy chain framework region 1 (VHFWR1) amino acid sequence of SEQ ID NO: 6014 (or a sequence with no more than 1, 2, 3, 4, 5, or 6 mutations, e.g., substitutions, additions, or deletions, therefrom), a VHFWR2 amino acid sequence of SEQ ID NO: 6015 (or a sequence with no more than 1, 2, 3, 4, 5, or 6 mutations, e.g., substitutions, additions, or deletions, therefrom), a VHFWR3 amino acid sequence of SEQ ID NO: 6016 (or a sequence with no more than 1, 2, 3, 4, 5, or 6 mutations, e.g., substitutions, additions, or deletions, therefrom), or a VHFWR4 amino acid sequence of SEQ ID NO: 6017 (or a sequence with no more than 1, 2, 3, 4, 5, or 6 mutations, e.g., substitutions, additions, or deletions, therefrom).

[0798] In some embodiments, the NK cell engager comprises a heavy chain variable region (VH) comprising a heavy chain framework region 1 (VHFWR1) amino acid sequence of SEQ ID NO: 6014, a VHFWR2 amino acid sequence of SEQ ID NO: 6015, a VHFWR3 amino acid sequence of SEQ ID NO: 6016, or a VHFWR4 amino acid sequence of SEQ ID NO: 6017.

[0799] In some embodiments, the NK cell engager comprises a VH comprising the amino acid sequence of SEQ ID NO: 6123 (or an amino acid sequence having at least about 75%, 80%, 85%, 90%, 95%, or 99% sequence identity to SEQ ID NO: 6123).

[0800] In some embodiments, the NK cell engager comprises a heavy chain variable region (VH) comprising a heavy chain framework region 1 (VHFWR1) amino acid sequence of SEQ ID NO: 6018 (or a sequence with no more than 1, 2, 3, 4, 5, or 6 mutations, e.g., substitutions, additions, or deletions, therefrom), a VHFWR2 amino acid sequence of SEQ ID NO: 6019 (or a sequence with no more than 1, 2, 3, 4, 5, or 6 mutations, e.g., substitutions, additions, or deletions, therefrom), a VHFWR3 amino acid sequence of SEQ ID NO: 6020 (or a sequence with no more than 1, 2, 3, 4, 5, or 6 mutations, e.g., substitutions, additions, or deletions, therefrom), or a VHFWR4 amino acid sequence of SEQ ID NO: 6021 (or a sequence with no more than 1, 2, 3, 4, 5, or 6 mutations, e.g., substitutions, additions, or deletions, therefrom).

[0801] In some embodiments, the NK cell engager comprises a heavy chain variable region (VH) comprising a heavy chain framework region 1 (VHFWR1) amino acid sequence of SEQ ID NO: 6018, a VHFWR2 amino acid sequence of SEQ ID NO: 6019, a VHFWR3 amino acid sequence of SEQ ID NO: 6020, or a VHFWR4 amino acid sequence of SEQ ID NO: 6021.

[0802] In some embodiments, the NK cell engager comprises a VH comprising the amino acid sequence of SEQ ID NO: 6124 (or an amino acid sequence having at least about 75%, 80%, 85%, 90%, 95%, or 99% sequence identity to SEQ ID NO: 6124).

[0803] In some embodiments, the NK cell engager comprises a heavy chain variable region (VH) comprising a heavy chain framework region 1 (VHFWR1) amino acid sequence of SEQ ID NO: 6022 (or a sequence with no more than 1, 2, 3, 4, 5, or 6 mutations, e.g., substitutions, additions, or deletions, therefrom), a VHFWR2 amino acid sequence of SEQ ID NO: 6023 (or a sequence with no more than 1, 2, 3, 4, 5, or 6 mutations, e.g., substitutions, additions, or deletions, therefrom), a VHFWR3 amino acid sequence of SEQ ID NO: 6024 (or a sequence with no more than 1, 2, 3, 4, 5, or 6 mutations, e.g., substitutions, additions, or deletions, therefrom), or a VHFWR4 amino acid sequence of SEQ ID NO: 6025 (or a sequence with no more than 1, 2, 3, 4, 5, or 6 mutations, e.g., substitutions, additions, or deletions, therefrom). In certain embodiments, the NK cell engager comprises a heavy chain variable region (VH) comprising a heavy chain framework region 1 (VHFWR1) amino acid sequence of SEQ ID NO: 6022, a VHFWR2 amino acid sequence of SEQ ID NO: 6023, a VHFWR3 amino acid sequence of SEQ ID NO: 6024, or a VHFWR4 amino acid sequence of SEQ ID NO: 6025. In certain embodiments, the NK cell engager comprises a VH comprising the amino acid sequence of SEQ ID NO: 6125 (or an amino acid sequence having at least about 75%, 80%, 85%, 90%, 95%, or 99% sequence identity to SEQ ID NO: 6125).

[0804] In some embodiments, the NK cell engager comprises a heavy chain variable region (VH) comprising a heavy chain framework region 1 (VHFWR1) amino acid sequence of SEQ ID NO: 6026 (or a sequence with no more than 1, 2, 3, 4, 5, or 6 mutations, e.g., substitutions, additions, or deletions, therefrom), a VHFWR2 amino acid sequence of SEQ ID NO: 6027 (or a sequence with no more than 1, 2, 3, 4, 5, or 6 mutations, e.g., substitutions, additions, or deletions, therefrom), a VHFWR3 amino acid sequence of SEQ ID NO: 6028 (or a sequence with no more than 1, 2, 3, 4, 5, or 6 mutations, e.g., substitutions, additions, or deletions, therefrom), or a VHFWR4 amino acid sequence of SEQ ID NO: 6029 (or a sequence with no more than 1, 2, 3, 4, 5, or 6 mutations, e.g., substitutions, additions, or deletions, therefrom). In certain embodiments, the NK cell engager comprises a heavy chain variable region (VH) comprising a heavy chain framework region 1 (VHFWR1) amino acid sequence of SEQ ID NO: 6026, a VHFWR2 amino acid sequence of SEQ ID NO: 6027, a VHFWR3 amino acid sequence of SEQ ID NO: 6028, or a VHFWR4 amino acid sequence of SEQ ID NO: 6029. In certain embodiments, the NK cell engager comprises a VH comprising the amino acid sequence of SEQ ID NO: 6126 (or an amino acid sequence having at least about 75%, 80%, 85%, 90%, 95%, or 99% sequence identity to SEQ ID NO: 6126).

[0805] In some embodiments, the NK cell engager comprises a heavy chain variable region (VH) comprising a heavy chain framework region 1 (VHFWR1) amino acid sequence of SEQ ID NO: 6030 (or a sequence with no more than 1, 2, 3, 4, 5, or 6 mutations, e.g., substitutions, additions, or deletions, therefrom), a VHFWR2 amino acid sequence of SEQ ID NO: 6032 (or a sequence with no more than 1, 2, 3, 4, 5, or 6 mutations, e.g., substitutions, additions, or deletions, therefrom), a VHFWR3 amino acid sequence of SEQ ID NO: 6033 (or a sequence with no more than 1, 2, 3, 4, 5, or 6 mutations, e.g., substitutions, additions, or deletions, therefrom), or a VHFWR4 amino acid sequence of SEQ ID NO: 6034 (or a sequence with no more than 1, 2, 3, 4, 5, or 6 mutations, e.g., substitutions, additions, or deletions, therefrom). In certain embodiments, the NK cell engager comprises a heavy chain variable region (VH) comprising a heavy chain framework region 1 (VHFWR1) amino acid sequence of SEQ ID NO: 6030, a VHFWR2 amino acid sequence of SEQ ID NO: 6032, a VHFWR3 amino acid sequence of SEQ ID NO: 6033, or a VHFWR4 amino acid sequence of SEQ ID NO: 6034. In certain embodiments, the NK cell engager comprises a VH comprising the amino acid sequence of SEQ ID NO: 6127 (or an amino acid sequence having at least about 75%, 80%, 85%, 90%, 95%, or 99% sequence identity to SEQ ID NO: 6127).

[0806] In some embodiments, the NK cell engager comprises a heavy chain variable region (VH) comprising a heavy chain framework region 1 (VHFWR1) amino acid sequence of SEQ ID NO: 6035 (or a sequence with no more than 1, 2, 3, 4, 5, or 6 mutations, e.g., substitutions, additions, or deletions, therefrom), a VHFWR2 amino acid sequence of SEQ ID NO: 6036 (or a sequence with no more than 1, 2, 3, 4, 5, or 6 mutations, e.g., substitutions, additions, or deletions, therefrom), a VHFWR3 amino acid sequence of SEQ ID NO: 6037 (or a sequence with no more than 1, 2, 3, 4, 5, or 6 mutations, e.g., substitutions, additions, or deletions, therefrom), or a VHFWR4 amino acid sequence of SEQ ID NO: 6038 (or a sequence with no more than 1, 2, 3, 4, 5, or 6 mutations, e.g., substitutions, additions, or deletions, therefrom).

[0807] In some embodiments, the NK cell engager comprises a heavy chain variable region (VH) comprising a heavy chain framework region 1 (VHFWR1) amino acid sequence of SEQ ID NO: 6035, a VHFWR2 amino acid sequence of SEQ ID NO: 6036, a VHFWR3 amino acid sequence of SEQ ID NO: 6037, or a VHFWR4 amino acid sequence of SEQ ID NO: 6038. In certain embodiments, the NK cell engager comprises a VH comprising the amino acid sequence of SEQ ID NO: 6128 (or an amino acid sequence having at least about 75%, 80%, 85%, 90%, 95%, or 99% sequence identity to SEQ ID NO: 6128).

[0808] In some embodiments, the NK cell engager comprises a light chain variable region (VL) comprising a light chain framework region 1 (VLFWR1) amino acid sequence of SEQ ID NO: 6077 (or a sequence with no more than 1, 2, 3, 4, 5, or 6 mutations, e.g., substitutions, additions, or deletions, therefrom), a VLFWR2 amino acid sequence of SEQ ID NO: 6078 (or a sequence with no more than 1, 2, 3, 4, 5, or 6 mutations, e.g., substitutions, additions, or deletions, therefrom), a VLFWR3 amino acid sequence of SEQ ID NO: 6079 (or a sequence with no more than 1, 2, 3, 4, 5, or 6 mutations, e.g., substitutions, additions, or deletions, therefrom), or a VLFWR4 amino acid sequence of SEQ ID NO: 6080 (or a sequence with no more than 1, 2, 3, 4, 5, or 6 mutations, e.g., substitutions, additions, or deletions, therefrom). In certain embodiments, the NK cell engager comprises a light chain variable region (VL) comprising a light chain framework region 1 (VLFWR1) amino acid sequence of SEQ ID NO: 6077, a VLFWR2 amino acid sequence of SEQ ID NO: 6078, a VLFWR3 amino acid sequence of SEQ ID NO: 6079, or a VLFWR4 amino acid sequence of SEQ ID NO: 6080. In certain embodiments, the NK cell engager comprises a VL comprising the amino acid sequence of SEQ ID NO: 6137 (or an amino acid sequence having at least about 93%, 95%, or 99% sequence identity to SEQ ID NO: 6137).

[0809] In some embodiments, the NK cell engager comprises a light chain variable region (VL) comprising a light chain framework region 1 (VLFWR1) amino acid sequence of SEQ ID NO: 6081 (or a sequence with no more than 1, 2, 3, 4, 5, or 6 mutations, e.g., substitutions, additions, or deletions, therefrom), a VLFWR2 amino acid sequence of SEQ ID NO: 6082 (or a sequence with no more than 1, 2, 3, 4, 5, or 6 mutations, e.g., substitutions, additions, or deletions, therefrom), a VLFWR3 amino acid sequence of SEQ ID NO: 6083 (or a sequence with no more than 1, 2, 3, 4, 5, or 6 mutations, e.g., substitutions, additions, or deletions, therefrom), or a VLFWR4 amino acid sequence of SEQ ID NO: 6084 (or a sequence with no more than 1, 2, 3, 4, 5, or 6 mutations, e.g., substitutions, additions, or deletions, therefrom).

[0810] In some embodiments, the NK cell engager comprises a light chain variable region (VL) comprising a light chain framework region 1 (VLFWR1) amino acid sequence of SEQ ID NO: 6081, a VLFWR2 amino acid sequence of SEQ ID NO: 6082, a VLFWR3 amino acid sequence of SEQ ID NO: 6083, or a VLFWR4 amino acid sequence of SEQ ID NO: 6084. In certain embodiments, the NK cell engager comprises a VL comprising the amino acid sequence of SEQ ID NO: 6138 (or an amino acid sequence having at least about 93%, 95%, or 99% sequence identity to SEQ ID NO: 6138).

[0811] In some embodiments, the NK cell engager comprises a light chain variable region (VL) comprising a light chain framework region 1 (VLFWR1) amino acid sequence of SEQ ID NO: 6085 (or a sequence with no more than 1, 2, 3, 4, 5, or 6 mutations, e.g., substitutions, additions, or deletions, therefrom), a VLFWR2 amino acid sequence of SEQ ID NO: 6086 (or a sequence with no more than 1, 2, 3, 4, 5, or 6 mutations, e.g., substitutions, additions, or deletions, therefrom), a VLFWR3 amino acid sequence of SEQ ID NO: 6087 (or a sequence with no more than 1, 2, 3, 4, 5, or 6 mutations, e.g., substitutions, additions, or deletions, therefrom), or a VLFWR4 amino acid sequence of SEQ ID NO: 6088 (or a sequence with no more than 1, 2, 3, 4, 5, or 6 mutations, e.g., substitutions, additions, or deletions, therefrom). In certain embodiments, the NK cell engager comprises a light chain variable region (VL) comprising a light chain framework region 1 (VLFWR1) amino acid sequence of SEQ ID NO: 6085, a VLFWR2 amino acid sequence of SEQ ID NO: 6086, a VLFWR3 amino acid sequence of SEQ ID NO: 6087, or a VLFWR4 amino acid sequence of SEQ ID NO: 6088. In certain embodiments, the NK cell engager comprises a VL comprising the amino acid sequence of SEQ ID NO: 6139 (or an amino acid sequence having at least about 93%, 95%, or 99% sequence identity to SEQ ID NO: 6139).

[0812] In some embodiments, the NK cell engager comprises a light chain variable region (VL) comprising a light chain framework region 1 (VLFWR1) amino acid sequence of SEQ ID NO: 6089 (or a sequence with no more than 1, 2, 3, 4, 5, or 6 mutations, e.g., substitutions, additions, or deletions, therefrom), a VLFWR2 amino acid sequence of SEQ ID NO: 6090 (or a sequence with no more than 1, 2, 3, 4, 5, or 6 mutations, e.g., substitutions, additions, or deletions, therefrom), a VLFWR3 amino acid sequence of SEQ ID NO: 6091 (or a sequence with no more than 1, 2, 3, 4, 5, or 6 mutations, e.g., substitutions, additions, or deletions, therefrom), or a VLFWR4 amino acid sequence of SEQ ID NO: 6092 (or a sequence with no more than 1, 2, 3, 4, 5, or 6 mutations, e.g., substitutions, additions, or deletions, therefrom). In certain embodiments, the NK cell engager comprises a light chain variable region (VL) comprising a light chain framework region 1 (VLFWR1) amino acid sequence of SEQ ID NO: 6089, a VLFWR2 amino acid sequence of SEQ ID NO: 6090, a VLFWR3 amino acid sequence of SEQ ID NO: 6091, or a VLFWR4 amino acid sequence of SEQ ID NO: 6092. In certain embodiments, the NK cell engager comprises a VL comprising the amino acid sequence of SEQ ID NO: 6140 (or an amino acid sequence having at least about 93%, 95%, or 99% sequence identity to SEQ ID NO: 6140).

[0813] In some embodiments, the NK cell engager comprises a light chain variable region (VL) comprising a light chain framework region 1 (VLFWR1) amino acid sequence of SEQ ID NO: 6093 (or a sequence with no more than 1, 2, 3, 4, 5, or 6 mutations, e.g., substitutions, additions, or deletions, therefrom), a VLFWR2 amino acid sequence of SEQ ID NO: 6094 (or a sequence with no more than 1, 2, 3, 4, 5, or 6 mutations, e.g., substitutions, additions, or deletions, therefrom), a VLFWR3 amino acid sequence of SEQ ID NO: 6095 (or a sequence with no more than 1, 2, 3, 4, 5, or 6 mutations, e.g., substitutions, additions, or deletions, therefrom), or a VLFWR4 amino acid sequence of SEQ ID NO: 6096 (or a sequence with no more than 1, 2, 3, 4, 5, or 6 mutations, e.g., substitutions, additions, or deletions, therefrom). In certain embodiments, the NK cell engager comprises a light chain variable region (VL) comprising a light chain framework region 1 (VLFWR1) amino acid sequence of SEQ ID NO: 6093, a VLFWR2 amino acid sequence of SEQ ID NO: 6094, a VLFWR3 amino acid sequence of SEQ ID NO: 6095, or a VLFWR4 amino acid sequence of SEQ ID NO: 6096. In certain embodiments, the NK cell engager comprises a VL comprising the amino acid sequence of SEQ ID NO: 6141 (or an amino acid sequence having at least about 93%, 95%, or 99% sequence identity to SEQ ID NO: 6141).

[0814] In some embodiments, the NK cell engager comprises:
[0815] (i) a heavy chain variable region (VH) comprising a heavy chain complementarity determining region 1 (VHCDR1) amino acid sequence of SEQ ID NO: 6007 (or a sequence with no more than 1, 2, 3, or 4 mutations, e.g., substitutions, additions, or deletions), a VHCDR2 amino acid sequence of SEQ ID NO: 6008 (or a sequence with no more than 1, 2, 3, or 4 mutations, e.g., substitutions, additions, or deletions), and/or a VHCDR3 amino acid sequence of SEQ ID NO: 6009 (or a sequence with no more than 1, 2, 3, or 4 mutations, e.g., substitutions, additions, or deletions), and
[0816] (ii) a light chain variable region (VL) comprising a light chain complementarity determining region 1 (VLCDR1) amino acid sequence of SEQ ID NO: 6070 (or a sequence with no more than 1, 2, 3, or 4 mutations, e.g., substitutions, additions, or deletions), a VLCDR2 amino acid sequence of SEQ ID NO: 6071 (or a sequence with no more than 1, 2, 3, or 4 mutations, e.g., substitutions, additions, or deletions), and/or a VLCDR3 amino acid sequence of SEQ ID NO: 6072 (or a sequence with no more than 1, 2, 3, or 4 mutations, e.g., substitutions, additions, or deletions). In certain embodiments, the NK cell engager comprises:
[0817] (i) a heavy chain variable region (VH) comprising a heavy chain complementarity determining region 1 (VHCDR1) amino acid sequence of SEQ ID NO: 6007, a VHCDR2 amino acid sequence of SEQ ID NO: 6008, and/or a VHCDR3 amino acid sequence of SEQ ID NO: 6009, and
[0818] (ii) a light chain variable region (VL) comprising a light chain complementarity determining region 1 (VLCDR1) amino acid sequence of SEQ ID NO: 6070, a VLCDR2 amino acid sequence of SEQ ID NO: 6071, and/or a VLCDR3 amino acid sequence of SEQ ID NO: 6072.

[0819] In some embodiments, the NK cell engager comprises: (1) a heavy chain variable region (VH) comprising a heavy chain framework region 1 (VHFWR1) amino acid sequence of SEQ ID NO: 6010 (or a sequence with no more than 1, 2, 3, 4, 5, or 6 mutations, e.g., substitutions, additions, or deletions, therefrom), a VHFWR2 amino acid sequence of SEQ ID NO: 6011 (or a sequence with no more than 1, 2, 3, 4, 5, or 6 mutations, e.g., substitutions, additions, or deletions, therefrom), a VHFWR3 amino acid sequence of SEQ ID NO: 6012 (or a sequence with no more than 1, 2, 3, 4, 5, or 6 mutations, e.g., substitutions, additions, or deletions, therefrom), or a VHFWR4 amino acid sequence of SEQ ID NO: 6013 (or a sequence with no more than 1, 2, 3, 4, 5, or 6 mutations, e.g., substitutions, additions, or deletions, therefrom), and/or (2) a light chain variable region (VL) comprising a light chain framework region 1 (VLFWR1) amino acid sequence of SEQ ID NO: 6073 (or a sequence with no more than 1, 2, 3, 4, 5, or 6 mutations, e.g., substitutions, additions, or deletions, therefrom), a VLFWR2 amino acid sequence of SEQ ID NO: 6074 (or a sequence with no more than 1, 2, 3, 4, 5, or 6 mutations, e.g., substitutions, additions, or deletions, therefrom), a VLFWR3 amino acid sequence of SEQ ID NO: 6075 (or a sequence with no more than 1, 2, 3, 4, 5, or 6 mutations, e.g., substitutions, additions, or deletions, therefrom), or a VLFWR4 amino acid sequence of SEQ ID NO: 6076 (or a sequence with no more than 1, 2, 3, 4, 5, or 6 mutations, e.g., substitutions, additions, or deletions, therefrom). In certain embodiments, the NK cell engager comprises: (1) a heavy chain variable region (VH) comprising a heavy chain framework region 1 (VHFWR1) amino acid sequence of SEQ ID NO: 6010, a VHFWR2 amino acid sequence of SEQ ID NO: 6011, a VHFWR3 amino acid sequence of SEQ ID NO: 6012, or a VHFWR4 amino acid sequence of SEQ ID NO: 6013, and (3) a light chain variable region (VL) comprising a light chain framework region 1 (VLFWR1) amino acid sequence of SEQ ID NO: 6073, a VLFWR2 amino acid sequence of SEQ ID NO: 6074, a VLFWR3 amino acid sequence of SEQ ID NO: 6075, or a VLFWR4 amino acid sequence of SEQ ID NO: 6076.

[0820] In some embodiments, the NK cell engager comprises:
[0821] (i) a VH comprising the amino acid sequence of SEQ ID NO: 6122 (or an amino acid sequence having at least about 75%, 80%, 85%, 90%, 95%, or 99% sequence identity to SEQ ID NO: 6122), and/or
[0822] (ii) a VL comprising the amino acid sequence of SEQ ID NO: 6136 (or an amino acid sequence having at least about 93%, 95%, or 99% sequence identity to SEQ ID NO: 6136).

[0823] In some embodiments, the NK cell engager comprises a heavy chain comprising the amino acid sequence of SEQ ID NOs: 6151 or 6152 (or an amino acid sequence having at least about 75%, 80%, 85%, 90%, 95%, or 99% sequence identity to SEQ ID NOs: 6151 or 6152).

[0824] In some embodiments, the NK cell engager comprises a light chain comprising the amino acid sequence of SEQ ID NO: 6153 (or an amino acid sequence having at least about 75%, 80%, 85%, 90%, 95%, or 99% sequence identity to SEQ ID NO: 6153).

[0825] In some embodiments, the NK cell engager comprises a heavy chain comprising the amino acid sequence of SEQ ID NOs: 6151 or 6152 (or an amino acid sequence having at least about 75%, 80%, 85%, 90%, 95%, or 99% sequence identity to SEQ ID NOs: 6151 or 6152), and a light chain comprising the amino acid sequence of SEQ ID NO: 6153 (or an amino acid sequence having at least about 75%, 80%, 85%, 90%, 95%, or 99% sequence identity to SEQ ID NO: 6153).

[0826] In some embodiments, the NK cell engager comprises a heavy chain variable region (VH) comprising a heavy chain framework region 1 (VHFWR1) amino acid sequence of SEQ ID NO: 6039 (or a sequence with no more than 1, 2, 3, 4, 5, or 6 mutations, e.g., substitutions, additions, or deletions, therefrom), a VHFWR2 amino acid sequence of SEQ ID NO: 6040 (or a sequence with no more than 1, 2, 3, 4, 5, or 6 mutations, e.g., substitutions, additions, or deletions, therefrom), a VHFWR3 amino acid sequence of SEQ ID NO: 6041 (or a sequence with no more than 1, 2, 3, 4, 5, or 6 mutations, e.g., substitutions, additions, or deletions, therefrom), or a VHFWR4 amino acid sequence of SEQ ID NO: 6042 (or a sequence with no more than 1, 2, 3, 4, 5, or 6 mutations, e.g., substitutions, additions, or deletions, therefrom).

[0827] In some embodiments, the NK cell engager comprises a heavy chain variable region (VH) comprising a heavy chain framework region 1 (VHFWR1) amino acid sequence of SEQ ID NO: 6039, a VHFWR2 amino acid sequence of SEQ ID NO: 6040, a VHFWR3 amino acid sequence of SEQ ID NO: 6041, or a VHFWR4 amino acid sequence of SEQ ID NO: 6042. In certain embodiments, the NK cell engager comprises a VH comprising the amino acid sequence of SEQ ID NO: 6129 (or an amino acid sequence having at least about 75%, 80%, 85%, 90%, 95%, or 99% sequence identity to SEQ ID NO: 6129).

[0828] In some embodiments, the NK cell engager comprises a heavy chain variable region (VH) comprising a heavy chain framework region 1 (VHFWR1) amino acid sequence of SEQ ID NO: 6043 (or a sequence with no more than 1, 2, 3, 4, 5, or 6 mutations, e.g., substitutions, additions, or deletions, therefrom), a VHFWR2 amino acid sequence of SEQ ID NO: 6044 (or a sequence with no more than 1, 2, 3, 4, 5, or 6 mutations, e.g., substitutions, additions, or deletions, therefrom), a VHFWR3 amino acid sequence of SEQ ID NO: 6045 (or a sequence with no more than 1, 2, 3, 4, 5, or 6 mutations, e.g., substitutions, additions, or deletions, therefrom), or a VHFWR4 amino acid sequence of SEQ ID NO: 6046 (or a sequence with no more than 1, 2, 3, 4, 5, or 6 mutations, e.g., substitutions, additions, or deletions, therefrom).

[0829] In some embodiments, the NK cell engager comprises a heavy chain variable region (VH) comprising a heavy chain framework region 1 (VHFWR1) amino acid sequence of SEQ ID NO: 6043, a VHFWR2 amino acid sequence of SEQ ID NO: 6044, a VHFWR3 amino acid sequence of SEQ ID NO: 6045, or a VHFWR4 amino acid sequence of SEQ ID NO: 6046.

[0830] In some embodiments, the NK cell engager comprises a VH comprising the amino acid sequence of SEQ ID NO: 6130 (or an amino acid sequence having at least about 75%, 80%, 85%, 90%, 95%, or 99% sequence identity to SEQ ID NO: 6130).

[0831] In some embodiments, the NK cell engager comprises a heavy chain variable region (VH) comprising a heavy chain framework region 1 (VHFWR1) amino acid sequence of SEQ ID NO: 6047 (or a sequence with no more than 1, 2, 3, 4, 5, or 6 mutations, e.g., substitutions, additions, or deletions, therefrom), a VHFWR2 amino acid sequence of SEQ ID NO: 6048 (or a sequence with no more than 1, 2, 3, 4, 5, or 6 mutations, e.g., substitutions, additions, or deletions, therefrom), a VHFWR3 amino acid sequence of SEQ ID NO: 6049 (or a sequence with no more than 1, 2, 3, 4, 5, or 6 mutations, e.g., substitutions, additions, or deletions, therefrom), or a VHFWR4 amino acid sequence of SEQ ID NO: 6050 (or a sequence with no more than 1, 2, 3, 4, 5, or 6 mutations, e.g., substitutions, additions, or deletions, therefrom). In certain embodiments, the NK cell engager comprises a heavy chain variable region (VH) comprising a heavy chain framework region 1 (VHFWR1) amino acid sequence of SEQ ID NO: 6047, a VHFWR2 amino acid sequence of SEQ ID NO: 6048, a VHFWR3 amino acid sequence of SEQ ID NO: 6049, or a VHFWR4 amino acid sequence of SEQ ID NO: 6050. In certain embodiments, the NK cell engager comprises a VH comprising the amino acid sequence of SEQ ID NO: 6131 (or an amino acid sequence having at least about 75%, 80%, 85%, 90%, 95%, or 99% sequence identity to SEQ ID NO: 6131).

[0832] In some embodiments, the NK cell engager comprises a heavy chain variable region (VH) comprising a heavy chain framework region 1 (VHFWR1) amino acid sequence of SEQ ID NO: 6051 (or a sequence with no more than 1, 2, 3, 4, 5, or 6 mutations, e.g., substitutions, additions, or deletions, therefrom), a VHFWR2 amino acid sequence of SEQ ID NO: 6052 (or a sequence with no more than 1, 2, 3, 4, 5, or 6 mutations, e.g., substitutions, additions, or deletions, therefrom), a VHFWR3 amino acid sequence of SEQ ID NO: 6053 (or a sequence with no more than 1, 2, 3, 4, 5, or 6 mutations, e.g., substitutions, additions, or deletions, therefrom), or a VHFWR4 amino acid sequence of SEQ ID NO: 6054 (or a sequence with no more than 1, 2, 3, 4, 5, or 6 mutations, e.g., substitutions, additions, or deletions, therefrom). In certain embodiments, the NK cell engager comprises a heavy chain variable region (VH) comprising a heavy chain framework region 1 (VHFWR1) amino acid sequence of SEQ ID NO: 6051, a VHFWR2 amino acid sequence of SEQ ID NO: 6052, a VHFWR3 amino acid sequence of SEQ ID NO: 6053, or a VHFWR4 amino acid sequence of SEQ ID NO: 6054. In certain embodiments, the NK cell engager comprises a VH comprising the amino acid sequence of SEQ ID NO: 6132 (or an amino acid sequence having at least about 75%, 80%, 85%, 90%, 95%, or 99% sequence identity to SEQ ID NO: 6132).

[0833] In some embodiments, the NK cell engager comprises a heavy chain variable region (VH) comprising a heavy chain framework region 1 (VHFWR1) amino acid sequence of SEQ ID NO: 6055 (or a sequence with no more than 1, 2, 3, 4, 5, or 6 mutations, e.g., substitutions, additions, or deletions, therefrom), a VHFWR2 amino acid sequence of SEQ ID NO: 6056 (or a sequence with no more than 1, 2, 3, 4, 5, or 6 mutations, e.g., substitutions, additions, or deletions, therefrom), a VHFWR3 amino acid sequence of SEQ ID NO: 6057 (or a sequence with no more than 1, 2, 3, 4, 5, or 6 mutations, e.g., substitutions, additions, or deletions, therefrom), or a VHFWR4 amino acid sequence of SEQ ID NO: 6058 (or a sequence with no more than 1, 2, 3, 4, 5, or 6 mutations, e.g., substitutions, additions, or deletions, therefrom). In certain embodiments, the NK cell engager comprises a heavy chain variable region (VH) comprising a heavy chain framework region 1 (VHFWR1) amino acid sequence of SEQ ID NO: 6055, a VHFWR2 amino acid sequence of SEQ ID NO: 6056, a VHFWR3 amino acid sequence of SEQ ID NO: 6057, or a VHFWR4 amino acid sequence of SEQ ID NO: 6058. In certain embodiments, the NK cell engager comprises a VH comprising the amino acid sequence of SEQ ID NO: 6133 (or an amino acid sequence having at least about 75%, 80%, 85%, 90%, 95%, or 99% sequence identity to SEQ ID NO: 6133).

[0834] In some embodiments, the NK cell engager comprises a heavy chain variable region (VH) comprising a heavy chain framework region 1 (VHFWR1) amino acid sequence of SEQ ID NO: 6059 (or a sequence with no more than 1, 2, 3, 4, 5, or 6 mutations, e.g., substitutions, additions, or deletions, therefrom), a VHFWR2 amino acid sequence of SEQ ID NO: 6060 (or a sequence with no more than 1, 2, 3, 4, 5, or 6 mutations, e.g., substitutions, additions, or deletions, therefrom), a VHFWR3 amino acid sequence of SEQ ID NO: 6061 (or a sequence with no more than 1, 2, 3, 4, 5, or 6 mutations, e.g., substitutions, additions, or deletions, therefrom), or a VHFWR4 amino acid sequence of SEQ ID NO: 6062 (or a sequence with no more than 1, 2, 3, 4, 5, or 6 mutations, e.g., substitutions, additions, or deletions, therefrom). In certain embodiments, the NK cell engager comprises a heavy chain variable region (VH) comprising a heavy chain framework region 1 (VHFWR1) amino acid sequence of SEQ ID NO: 6059, a VHFWR2 amino acid sequence of SEQ ID NO: 6060, a VHFWR3 amino acid sequence of SEQ ID NO: 6061, or a VHFWR4 amino acid sequence of SEQ ID NO: 6062. In certain embodiments, the NK cell engager comprises a VH comprising the amino acid sequence of SEQ ID NO: 6134 (or an amino acid sequence having at least about 75%, 80%, 85%, 90%, 95%, or 99% sequence identity to SEQ ID NO: 6134).

[0835] In some embodiments, wherein the NK cell engager comprises a light chain variable region (VL) comprising a light chain framework region 1 (VLFWR1) amino acid sequence of SEQ ID NO: 6097 (or a sequence with no more than 1, 2, 3, 4, 5, or 6 mutations, e.g., substitutions, additions, or deletions, therefrom), a VLFWR2 amino acid sequence of SEQ ID NO: 6098 (or a sequence with no more than 1, 2, 3, 4, 5, or 6 mutations, e.g., substitutions, additions, or deletions, therefrom), a VLFWR3 amino acid sequence of SEQ ID NO: 6099 (or a sequence with no more than 1, 2, 3, 4, 5, or 6 mutations, e.g., substitutions, additions, or deletions, therefrom), or a VLFWR4 amino acid sequence of SEQ ID NO: 6100 (or a sequence with no more than 1, 2, 3, 4, 5, or 6 mutations, e.g., substitutions, additions, or deletions, therefrom). In certain embodiments, the NK cell engager comprises a light chain variable region (VL) comprising a light chain framework region 1 (VLFWR1) amino acid sequence of SEQ ID NO: 6097, a VLFWR2 amino acid sequence of SEQ ID NO: 6098, a VLFWR3 amino acid sequence of SEQ ID NO: 6099, or a VLFWR4 amino acid sequence of SEQ ID NO: 6100. In certain embodiments, wherein the NK cell engager comprises a VL comprising the amino acid sequence of SEQ ID NO: 6142 (or an amino acid sequence having at least about 93%, 95%, or 99% sequence identity to SEQ ID NO: 6142).

[0836] In some embodiments, the NK cell engager comprises a light chain variable region (VL) comprising a light chain framework region 1 (VLFWR1) amino acid sequence of SEQ ID NO: 6101 (or a sequence with no more than 1, 2, 3, 4, 5, or 6 mutations, e.g., substitutions, additions, or deletions, therefrom), a VLFWR2 amino acid sequence of SEQ ID NO: 6102 (or a sequence with no more than 1, 2, 3, 4, 5, or 6 mutations, e.g., substitutions, additions, or deletions, therefrom), a VLFWR3 amino acid sequence of SEQ ID NO: 6103 (or a sequence with no more than 1, 2, 3, 4, 5, or 6 mutations, e.g., substitutions, additions, or deletions, therefrom), or a VLFWR4 amino acid sequence of SEQ ID NO: 6104 (or a sequence with no more than 1, 2, 3, 4, 5, or 6 mutations, e.g., substitutions, additions, or deletions, therefrom). In certain embodiments, the NK cell engager comprises a light chain variable region (VL) comprising a light chain framework region 1 (VLFWR1) amino acid sequence of SEQ ID NO: 6101, a VLFWR2 amino acid sequence of SEQ ID NO: 6102, a VLFWR3 amino acid sequence of SEQ ID NO: 6103, or a VLFWR4 amino acid sequence of SEQ ID NO: 6104. In certain embodiments, the NK cell engager comprises a VL comprising the amino acid sequence of SEQ ID NO: 6143 (or an amino acid sequence having at least about 93%, 95%, or 99% sequence identity to SEQ ID NO: 6143).

[0837] In some embodiments, the NK cell engager comprises a light chain variable region (VL) comprising a light chain framework region 1 (VLFWR1) amino acid sequence of SEQ ID NO: 6105 (or a sequence with no more than 1, 2, 3, 4, 5, or 6 mutations, e.g., substitutions, additions, or deletions, therefrom), a VLFWR2 amino acid sequence of SEQ ID NO: 6106 (or a sequence with no more than 1, 2, 3, 4, 5, or 6 mutations, e.g., substitutions, additions, or deletions, therefrom), a VLFWR3 amino acid sequence of SEQ ID NO: 6107 (or a sequence with no more than 1, 2, 3, 4, 5, or 6 mutations, e.g., substitutions, additions, or deletions, therefrom), or a VLFWR4 amino acid sequence of SEQ ID NO: 6108 (or a sequence with no more than 1, 2, 3, 4, 5, or 6 mutations, e.g., substitutions, additions, or deletions, therefrom). In certain embodiments, the NK cell engager comprises a light chain variable region (VL) comprising a light chain framework region 1 (VLFWR1) amino acid sequence of SEQ ID NO: 6105, a VLFWR2 amino acid sequence of SEQ ID NO: 6106, a VLFWR3 amino acid sequence of SEQ ID NO: 6107, or a VLFWR4 amino acid sequence of SEQ ID NO: 6108. In certain embodiments, the NK cell engager comprises a VL comprising the amino acid sequence of SEQ ID NO: 6144 (or an amino acid sequence having at least about 93%, 95%, or 99% sequence identity to SEQ ID NO: 6144).

[0838] In some embodiments, the NK cell engager comprises a light chain variable region (VL) comprising a light chain framework region 1 (VLFWR1) amino acid sequence of SEQ ID NO: 6109 (or a sequence with no more than 1, 2, 3, 4, 5, or 6 mutations, e.g., substitutions, additions, or deletions, therefrom), a VLFWR2 amino acid sequence of SEQ ID NO: 6110 (or a sequence with no more than 1, 2, 3, 4, 5, or 6 mutations, e.g., substitutions, additions, or deletions, therefrom), a VLFWR3 amino acid sequence of SEQ ID NO: 6111 (or a sequence with no more than 1, 2, 3, 4, 5, or 6 mutations, e.g., substitutions, additions, or deletions, therefrom), or a VLFWR4 amino acid sequence of SEQ ID NO: 6112 (or a sequence with no more than 1, 2, 3, 4, 5, or 6 mutations, e.g., substitutions, additions, or deletions, therefrom). In certain embodiments, the NK cell engager comprises a light chain variable region (VL) comprising a light chain framework region 1 (VLFWR1) amino acid sequence of SEQ ID NO: 6109, a VLFWR2 amino acid sequence of SEQ ID NO: 6110, a VLFWR3 amino acid sequence of SEQ ID NO: 6111, or a VLFWR4 amino acid sequence of SEQ ID NO: 6112. In certain embodiments, the NK cell engager comprises a VL comprising the amino acid sequence of SEQ ID NO: 6145 (or an amino acid sequence having at least about 93%, 95%, or 99% sequence identity to SEQ ID NO: 6145).

[0839] In some embodiments, the NK cell engager comprises a light chain variable region (VL) comprising a light chain framework region 1 (VLFWR1) amino acid sequence of SEQ ID NO: 6113 (or a sequence with no more than 1, 2, 3, 4, 5, or 6 mutations, e.g., substitutions, additions, or deletions, therefrom), a VLFWR2 amino acid sequence of SEQ ID NO: 6114 (or a sequence with no more than 1, 2, 3, 4, 5, or 6 mutations, e.g., substitutions, additions, or deletions, therefrom), a VLFWR3 amino acid sequence of SEQ ID NO: 6115 (or a sequence with no more than 1, 2, 3, 4, 5, or 6 mutations, e.g., substitutions, additions, or deletions, therefrom), or a VLFWR4 amino acid sequence of SEQ ID NO: 6116 (or a sequence with no more than 1, 2, 3, 4, 5, or 6 mutations, e.g., substitutions, additions, or deletions, therefrom). In certain embodiments, the NK cell engager comprises a light chain variable region (VL) comprising a light chain framework region 1 (VLFWR1) amino acid sequence of SEQ ID NO: 6113, a VLFWR2 amino acid sequence of SEQ ID NO: 6114, a VLFWR3 amino acid sequence of SEQ ID NO: 6115, or a VLFWR4 amino acid sequence of SEQ ID NO: 6116. In certain embodiments, the NK cell engager comprises a VL comprising the amino acid sequence of SEQ ID NO: 6146 (or an amino acid sequence having at least about 93%, 95%, or 99% sequence identity to SEQ ID NO: 6146).

[0840] In some embodiments, the NK cell engager comprises a light chain variable region (VL) comprising a light chain framework region 1 (VLFWR1) amino acid sequence of SEQ ID NO: 6117 (or a sequence with no more than 1, 2, 3, 4, 5, or 6 mutations, e.g., substitutions, additions, or deletions, therefrom), a VLFWR2 amino acid sequence of SEQ ID NO: 6118 (or a sequence with no more than 1, 2, 3, 4, 5, or 6 mutations, e.g., substitutions, additions, or deletions, therefrom), a VLFWR3 amino acid sequence of SEQ ID NO: 6119 (or a sequence with no more than 1, 2, 3, 4, 5, or 6 mutations, e.g., substitutions, additions, or deletions, therefrom), or a VLFWR4 amino acid sequence of SEQ ID NO: 6120 (or a sequence with no more than 1, 2, 3, 4, 5, or 6 mutations, e.g., substitutions, additions, or deletions, therefrom). In certain embodiments, the NK cell engager comprises a light chain variable region (VL) comprising a light chain framework region 1 (VLFWR1) amino acid sequence of SEQ ID NO: 6117, a VLFWR2 amino acid sequence of SEQ ID NO: 6118, a VLFWR3 amino acid sequence of SEQ ID NO: 6119, or a VLFWR4 amino acid sequence of SEQ ID NO: 6120. In certain embodiments, the NK cell engager comprises a VL comprising the amino acid sequence of SEQ ID NO: 6147 (or an amino acid sequence having at least about 93%, 95%, or 99% sequence identity to SEQ ID NO: 6147).

[0841] In some embodiments, the NK cell engager is an antibody molecule, e.g., an antigen binding domain, that binds to NKp46. In certain embodiments, lysis of the lymphoma cell is mediated by NKp46. In some embodiments, the multifunctional molecule does not activate the NK cell when incubated with the NK cell in the absence of the tumor antigen on the lymphoma cell. In some embodiments, the multifunctional molecule activates the NK cell when the NK cell is a NKp46 expressing NK cell and the tumor antigen on the lymphoma cell is also present. In some embodiments, the multifunctional molecule does not activate the NK cell when the NK cell is not a NKp46 expressing NK cell and the tumor antigen on the lymphoma cell is also present. In some embodiments, the NK cell engager comprises a VH comprising the amino acid sequence of SEQ ID NO: 6182 (or an amino acid sequence having at least about 75%, 80%, 85%, 90%, 95%, or 99% sequence identity to SEQ ID NO: 6182). In some embodiments, the NK cell engager comprises a VL comprising the amino acid sequence of SEQ ID NO: 6183 (or an amino acid sequence having at least about 93%, 95%, or 99% sequence identity to SEQ ID NO: 6183). In some embodiments, the NK cell engager comprises an scFv comprising the amino acid sequence of SEQ ID NO: 6181 (or an amino acid sequence having at least about 93%, 95%, or 99% sequence identity to SEQ ID NO: 6181).

[0842] In some embodiments, the NK cell engager is an antibody molecule, e.g., an antigen binding domain, that binds to NKG2D. In certain embodiments, lysis of the lymphoma cell is mediated by NKG2D. In some embodiments, the multifunctional molecule does not activate the NK cell when incubated with the NK cell in the absence of the tumor antigen on the lymphoma cell. In some embodiments, the multifunctional molecule activates the NK cell when the NK cell is a NKG2D expressing NK cell and the tumor antigen on the lymphoma cell is also present. In some embodiments, the multifunctional molecule does not activate the NK cell when the NK cell is not a NKG2D expressing NK cell and the tumor antigen on the lymphoma cell is also present. In some embodiments, the NK cell engager comprises a VH comprising the amino acid sequence of SEQ ID NO: 6176 (or an amino acid sequence having at least about 75%, 80%, 85%, 90%, 95%, or 99% sequence identity to SEQ ID NO: 6176). In some embodiments, the NK cell engager comprises a VL comprising the amino acid sequence of SEQ ID NO: 6177 (or an amino acid sequence having at least about 93%, 95%, or 99% sequence identity to SEQ ID NO: 6177). In some embodiments, the NK cell engager comprises an scFv comprising the amino acid sequence of SEQ ID NO: 6175 (or an amino acid sequence having at least about 93%, 95%, or 99% sequence identity to SEQ ID NO: 6175). In some embodiments, the NK cell engager comprises a VH comprising the amino acid sequence of SEQ ID NO: 6179 (or an amino acid sequence having at least about 75%, 80%, 85%, 90%, 95%, or 99% sequence identity to SEQ ID NO: 6179). In some embodiments, the NK cell engager comprises a VL comprising the amino acid sequence of SEQ ID NO: 6180 (or an amino acid sequence having at least about 93%, 95%, or 99% sequence identity to SEQ ID NO: 6180). In some embodiments, the NK cell engager comprises an scFv comprising the amino acid sequence of SEQ ID NO: 6178 (or an amino acid sequence having at least about 93%, 95%, or 99% sequence identity to SEQ ID NO: 6178).

[0843] In some embodiments, the NK cell engager is an antibody molecule, e.g., an antigen binding domain, that binds to CD16. In some embodiments, lysis of the lymphoma cell is mediated by CD16. In some embodiments, the multifunctional molecule does not activate the NK cell when incubated with the NK cell in the absence of the tumor antigen on the lymphoma cell. In some embodiments, the multifunctional molecule activates the NK cell when the NK cell is a CD16 expressing NK cell and the tumor antigen on the lymphoma cell is also present. In some embodiments, the multifunctional molecule does not activate the NK cell when the NK cell is not a CD16 expressing NK cell and the tumor antigen on the lymphoma cell is also present. In some embodiments, the NK cell engager comprises a VH comprising the amino acid sequence of SEQ ID NO: 6185 (or an amino acid sequence having at least about 75%, 80%, 85%, 90%, 95%, or 99% sequence identity to SEQ ID NO: 6185). In some embodiments, the NK cell engager comprises a VL comprising the amino acid sequence of SEQ ID NO: 6186 (or an amino acid sequence having at least about 93%, 95%, or 99% sequence identity to SEQ ID NO: 6186). In some embodiments, the NK cell engager comprises an scFv comprising the amino acid sequence of SEQ ID NO: 6184 (or an amino acid sequence having at least about 93%, 95%, or 99% sequence identity to SEQ ID NO: 6184).

[0844] In some embodiments, the NK cell engager is a ligand, optionally, the ligand further comprises an immunoglobulin constant region, e.g., an Fc region. In certain embodiments, the NK cell engager is a ligand of NKp44 or NKp46, e.g., a viral HA. In certain embodiments, the NK cell engager is a ligand of DAP10, e.g., a coreceptor for NKG2D. In certain embodiments, the NK cell engager is a ligand of CD16, e.g., a CD16a/b ligand, e.g., a CD16a/b ligand further comprising an antibody Fc region.

### B Cell, Macrophage & Dendritic Cell Engagers

[0845] Broadly, B cells, also known as B lymphocytes, are a type of white blood cell of the lymphocyte subtype. They function in the humoral immunity component of the adaptive immune system by secreting antibodies. Additionally, B cells present antigen (they are also classified as professional antigen-presenting cells (APCs)) and secrete cytokines. Macrophages are a type of white blood cell that engulfs and digests cellular debris, foreign substances, microbes, cancer cells via phagocytosis. Besides phagocytosis, they play important roles in nonspecific defense (innate immunity) and also help initiate specific defense mechanisms (adaptive immunity) by recruiting other immune cells such as lymphocytes. For example, they are important as antigen presenters to T cells. Beyond increasing inflammation and stimulating the immune system, macrophages also play an important anti-inflammatory role and can decrease immune reactions through the release of cytokines. Dendritic cells (DCs) are antigen-presenting cells that function in processing antigen material and present it on the cell surface to the T cells of the immune system.

[0846] The present disclosure provides, inter alia, multispecific (e.g., bi-, tri-, quad-specific) or multifunctional molecules, that include, e.g., are engineered to contain, one or more B cell, macrophage, and/or dendritic cell engager that mediate binding to and/or activation of a B cell, macrophage, and/or dendritic cell.

[0847] Accordingly, in some embodiments, the immune cell engager comprises a B cell, macrophage, and/or dendritic cell engager chosen from one or more of CD40 ligand (CD40L) or a CD70 ligand; an antibody molecule that binds to CD40 or CD70; an antibody molecule to OX40; an OX40 ligand (OX40L); an agonist of a Toll-like receptor (e.g., as described herein, e.g., a TLR4, e.g., a constitutively active TLR4 (caTLR4), or a TLR9 agonists); a 41BB; a CD2; a CD47; or a STING agonist, or a combination thereof.

[0848] In some embodiments, the B cell engager is a CD40L, an OX40L, or a CD70 ligand, or an antibody molecule that binds to OX40, CD40 or CD70.

[0849] In some embodiments, the macrophage engager is a CD2 agonist. In some embodiments, the macrophage engager is an antigen binding domain that binds to: CD40L or antigen binding domain or ligand that binds CD40, a Toll like receptor (TLR) agonist (e.g., as described herein), e.g., a TLR9 or TLR4 (e.g., caTLR4 (constitutively active TLR4), CD47, or a STING agonist. In some embodiments, the STING agonist is a cyclic dinucleotide, e.g., cyclic di-GMP (cdGMP) or cyclic di-AMP (cdAMP). In some embodiments, the STING agonist is biotinylated.

[0850] In some embodiments, the dendritic cell engager is a CD2 agonist. In some embodiments, the dendritic cell engager is a ligand, a receptor agonist, or an antibody molecule that binds to one or more of: OX40L, 41BB, a TLR agonist (e.g., as described herein) (e.g., TLR9 agonist, TLR4 (e.g., caTLR4 (constitutively active TLR4)), CD47, or and a STING agonist. In some embodiments, the STING agonist is a cyclic dinucleotide, e.g., cyclic di-GMP (cdGMP) or cyclic di-AMP (cdAMP). In some embodiments, the STING agonist is biotinylated.

[0851] In other embodiments, the immune cell engager mediates binding to, or activation of, one or more of a B cell, a macrophage, and/or a dendritic cell. Exemplary B cell, macrophage, and/or dendritic cell engagers can be chosen from one or more of CD40 ligand (CD40L) or a CD70 ligand; an antibody molecule that binds to CD40 or CD70; an antibody molecule to OX40; an OX40 ligand (OX40L); a Toll-like receptor agonist (e.g., a TLR4, e.g., a constitutively active TLR4 (caTLR4) or a TLR9 agonist); a 41BB agonist; a CD2; a CD47; or a STING agonist, or a combination thereof.

[0852] In some embodiments, the B cell engager is chosen from one or more of a CD40L, an OX40L, or a CD70 ligand, or an antibody molecule that binds to OX40, CD40 or CD70.

[0853] In other embodiments, the macrophage cell engager is chosen from one or more of a CD2 agonist; a CD40L; an OX40L; an antibody molecule that binds to OX40, CD40 or CD70; a Toll-like receptor agonist or a fragment thereof (e.g., a TLR4, e.g., a constitutively active TLR4 (caTLR4)); a CD47 agonist; or a STING agonist.

[0854] In other embodiments, the dendritic cell engager is chosen from one or more of a CD2 agonist, an OX40 antibody, an OX40L, 41BB agonist, a Toll-like receptor agonist or a fragment thereof (e.g., a TLR4, e.g., a constitutively active TLR4 (caTLR4)), CD47 agonist, or a STING agonist.

[0855] In one embodiment, the OX40L comprises the amino acid sequence:

(SEQ ID NO: 6210)
QVSHRYPRIQSIKVQFTEYKKEKGFILTSQKEDEIMKVQNNSVIINCDG
FYLISLKGYFSQEVNISLHYQKDEEPLFQLKKVRSVNSLMVASLTYKDK
VYLNVTTDNTSLDDFHVNGGELILIHQNPGEFCVL,

a fragment thereof, or an amino acid sequence substantially identical thereto (e.g., 95% to 99.9% identical thereto, or having at least one amino acid alteration, but not more than five, ten or fifteen alterations (e.g., substitutions, deletions, or insertions, e.g., conservative substitutions) to the amino acid sequence of SEQ ID NO: 6210.

[0856] In another embodiment the CD40L comprises the amino acid sequence:

(SEQ ID NO: 6211)
MQKGDQNPQIAAHVISEASSKTTSVLQWAEKGYYTMSNNLVTLENGKQL
TVKRQGLYYIYAQVTFCSNREASSQAPFIASLCLKSPGRFERILLRAAN
THSSAKPCGQQSIHLGGVFELQPGASVFVNVTDPSQVSHGTGFTSFGLL
KL,

a fragment thereof, or an amino acid sequence substantially identical thereto (e.g., 95% to 99.9% identical thereto, or having at least one amino acid alteration, but not more than five, ten or fifteen alterations (e.g., substitutions, deletions, or insertions, e.g., conservative substitutions) to the amino acid sequence of SEQ ID NO: 6211.

[0857] In yet other embodiments, the STING agonist comprises a cyclic dinucleotide, e.g., a cyclic di-GMP (cdGMP), a cyclic di-AMP (cdAMP), or a combination thereof, optionally with 2′,5′ or 3′,5′ phosphate linkages.

[0858] In one embodiment, the immune cell engager includes 41BB ligand, e.g., comprising the amino acid sequence:

(SEQ ID NO: 6212)
ACPWAVSGARASPGSAASPRLREGPELSPDDPAGLLDLRQGMFAQLVAQ
NVLLIDGPLSWYSDPGLAGVSLTGGLSYKEDTKELVVAKAGVYYVFFQL
ELRRVVAGEGSGSVSLALHLQPLRSAAGAAALALTVDLPPASSEARNSA
FGFQGRLLHLSAGQRLGVHLHTEARARHAWQLTQGATVLGLFRVTPEIP
AGLPSPRSE,

a fragment thereof, or an amino acid sequence substantially identical thereto (e.g., 95% to 99.9% identical thereto, or having at least one amino acid alteration, but not more than five, ten or fifteen alterations (e.g., substitutions, deletions, or insertions, e.g., conservative substitutions) to the amino acid sequence of SEQ ID NO: 6212.

### Toll-Like Receptors

[0859] Toll-Like Receptors (TLRs) are evolutionarily conserved receptors are homologues of the Drosophila Toll protein, and recognize highly conserved structural motifs known as pathogen-associated microbial patterns (PAMPs), which are exclusively expressed by microbial pathogens, or danger-associated molecular patterns (DAMPs) that are endogenous molecules released from necrotic or dying cells. PAMPs include various bacterial cell wall components such as lipopolysaccharide (LPS), peptidoglycan (PGN) and lipopeptides, as well as flagellin, bacterial DNA and viral double-stranded RNA. DAMPs include intracellular proteins such as heat shock proteins as well as protein fragments from the extracellular matrix. Stimulation of TLRs by the corresponding PAMPs or DAMPs initiates signaling cascades leading to the activation of transcription factors, such as AP-1, NF-κB and interferon regulatory factors (IRFs). Signaling by TLRs results in a variety of cellular responses, including the production of interferons (IFNs), pro-inflammatory cytokines and effector cytokines that direct the adaptive immune response. TLRs are implicated in a number of inflammatory and immune disorders and play a role in cancer (Rakoff-Nahoum S. & Medzhitov R., 2009. Toll-like receptors and cancer. Nat Revs Cancer 9:57-63.)

[0860] TLRs are type I transmembrane proteins characterized by an extracellular domain containing leucine-rich repeats (LRRs) and a cytoplasmic tail that contains a conserved region called the Toll/IL-1 receptor (TIR) domain. Ten human and twelve murine TLRs have been characterized, TLR1 to TLR10 in humans, and TLR1 to TLR9, TLR11, TLR12 and TLR13 in mice, the homolog of TLR10 being a pseudogene. TLR2 is essential for the recognition of a variety of PAMPs from Gram-positive bacteria, including bacterial lipoproteins, lipomannans and lipoteichoic acids. TLR3 is implicated in virus-derived double-stranded RNA. TLR4 is predominantly activated by lipopolysaccharide. TLR5 detects bacterial flagellin and TLR9 is required for response to unmethylated CpG DNA. Finally, TLR7 and TLR8 recognize small synthetic antiviral molecules, and single-stranded RNA was reported to be their natural ligand. TLR11 has been reported to recognize uropathogenic E. coli and a profilin-like protein from Toxoplasma gondii. The repertoire of specificities of the TLRs is apparently extended by the ability of TLRs to heterodimerize with one another. For example, dimers of TLR2 and TLR6 are required for responses to diacylated lipoproteins while TLR2 and TLR1 interact to recognize triacylated lipoproteins. Specificities of the TLRs are also influenced by various adapter and accessory molecules, such as MD-2 and CD14 that form a complex with TLR4 in response to LPS.

[0861] TLR signaling consists of at least two distinct pathways: a MyD88-dependent pathway that leads to the production of inflammatory cytokines, and a MyD88-independent pathway associated with the stimulation of IFN-β and the maturation of dendritic cells. The MyD88-dependent pathway is common to all TLRs, except TLR3 (Adachi O. et al., 1998. Targeted disruption of the MyD88 gene results in loss of IL-1- and IL-18-mediated function. Immunity. 9(1):143-50). Upon activation by PAMPs or DAMPs, TLRs hetero- or homodimerize inducing the recruitment of adaptor proteins via the cytoplasmic TIR domain. Individual TLRs induce different signaling responses by usage of the different adaptor molecules. TLR4 and TLR2 signaling requires the adaptor TIRAP/Mal, which is involved in the MyD88-dependent pathway. TLR3 triggers the production of IFN-β in response to double-stranded RNA, in a MyD88-independent manner, through the adaptor TRIF/TICAM-1. TRAM/TICAM-2 is another adaptor molecule involved in the MyD88-independent pathway which function is restricted to the TLR4 pathway.

[0862] TLR3, TLR7, TLR8 and TLR9 recognize viral nucleic acids and induce type I IFNs. The signaling mechanisms leading to the induction of type I IFNs differ depending on the TLR activated. They involve the interferon regulatory factors, IRFs, a family of transcription factors known to play a critical role in antiviral defense, cell growth and immune regulation. Three IRFs (IRF3, IRF5 and IRF7) function as direct transducers of virus-mediated TLR signaling. TLR3 and TLR4 activate IRF3 and IRF7, while TLR7 and TLR8 activate IRF5 and IRF7 (Doyle S. et al., 2002. IRF3 mediates a TLR3/TLR4-specific antiviral gene program. Immunity. 17(3):251-63). Furthermore, type I IFN production stimulated by TLR9 ligand CpG-A has been shown to be mediated by PI(3)K and mTOR (Costa-Mattioli M. & Sonenberg N. 2008. RAPping production of type I interferon in pDCs through mTOR. Nature Immunol. 9: 1097-1099).

[0863] TLR-9

[0864] TLR9 recognizes unmethylated CpG sequences in DNA molecules. CpG sites are relatively rare (˜1%) on vertebrate genomes in comparison to bacterial genomes or viral DNA. TLR9 is expressed by numerous cells of the immune system such as B lymphocytes, monocytes, natural killer (NK) cells, and plasmacytoid dendritic cells. TLR9 is expressed intracellularly, within the endosomal compartments and functions to alert the immune system of viral and bacterial infections by binding to DNA rich in CpG motifs. TLR9 signals leads to activation of the cells initiating pro-inflammatory reactions that result in the production of cytokines such as type-I interferon and IL-12.

[0865] TLR Agonists

[0866] A TLR agonist can agonize one or more TLR, e.g., one or more of human TLR-1, 2, 3, 4, 5, 6, 7, 8, 9, or 10. In some embodiments, an adjunctive agent described herein is a TLR agonist. In some embodiments, the TLR agonist specifically agonizes human TLR-9. In some embodiments, the TLR-9 agonist is a CpG moiety. As used herein, a CpG moiety, is a linear dinucleotide having the sequence: 5′-C-phosphate-G-3′, that is, cytosine and guanine separated by only one phosphate.

[0867] In some embodiments, the CpG moiety comprises at least 1, 2, 3, 4, 5, 6, 7, 8, 9, 10, 11, 12, 13, 14, 15, 16, 17, 18, 19, 20, 21, 22, 23, 24, 25, 26, 27, 28, 29, 30, or more CpG dinucleotides. In some embodiments, the CpG moiety consists of 1, 2, 3, 4, 5, 6, 7, 8, 9, 10, 11, 12, 13, 14, 15, 16, 17, 18, 19, 20, 21, 22, 23, 24, 25, 26, 27, 28, 29, or 30 CpG dinucleotides. In some embodiments, the CpG moiety has 1-5, 1-10, 1-20, 1-30, 1-40, 1-50, 5-10, 5-20, 5-30, 10-20, 10-30, 10-40, or 10-50 CpG dinucleotides.

[0868] In some embodiments, the TLR-9 agonist is a synthetic ODN (oligodeoxynucleotides). CpG ODNs are short synthetic single-stranded DNA molecules containing unmethylated CpG dinucleotides in particular sequence contexts (CpG motifs). CpG ODNs possess a partially or completely phosphorothioated (PS) backbone, as opposed to the natural phosphodiester (PO) backbone found in genomic bacterial DNA. There are three major classes of CpG ODNs: classes A, B and C, which differ in their immunostimulatory activities. CpG-A ODNs are characterized by a PO central CpG-containing palindromic motif and a PS-modified 3′ poly-G string. They induce high IFN-α production from pDCs but are weak stimulators of TLR9-dependent NF-κB signaling and pro-inflammatory cytokine (e.g. IL-6) production. CpG-B ODNs contain a full PS backbone with one or more CpG dinucleotides. They strongly activate B cells and TLR9-dependent NF-κB signaling but weakly stimulate IFN-α secretion. CpG-C ODNs combine features of both classes A and B. They contain a complete PS backbone and a CpG-containing palindromic motif C-Class CpG ODNs induce strong IFN-α production from pDC as well as B cell stimulation.

### Cytokine Molecules

[0869] Cytokines are generally polypeptides that influence cellular activity, for example, through signal transduction pathways. Accordingly, a cytokine of the multispecific or multifunctional polypeptide is useful and can be associated with receptor-mediated signaling that transmits a signal from outside the cell membrane to modulate a response within the cell. Cytokines are proteinaceous signaling compounds that are mediators of the immune response. They control many different cellular functions including proliferation, differentiation and cell survival/apoptosis; cytokines are also involved in several pathophysiological processes including viral infections and autoimmune diseases. Cytokines are synthesized under various stimuli by a variety of cells of both the innate (monocytes, macrophages, dendritic cells) and adaptive (T- and B-cells) immune systems. Cytokines can be classified into two groups: pro- and anti-inflammatory. Pro-inflammatory cytokines, including IFNγ, IL-1, IL-6 and TNF-alpha, are predominantly derived from the innate immune cells and Th1 cells. Anti-inflammatory cytokines, including IL-10, IL-4, IL-13 and IL-5, are synthesized from Th2 immune cells.

[0870] The present disclosure provides, inter alia, multispecific (e.g., bi-, tri-, quad-specific) or multifunctional molecules, that include, e.g., are engineered to contain, one or more cytokine molecules, e.g., immunomodulatory (e.g., proinflammatory) cytokines and variants, e.g., functional variants, thereof. Accordingly, in some embodiments, the cytokine molecule is an interleukin or a variant, e.g., a functional variant thereof. In some embodiments the interleukin is a proinflammatory interleukin. In some embodiments the interleukin is chosen from interleukin-2 (IL-2), interleukin-12 (IL-12), interleukin-15 (IL-15), interleukin-18 (IL-18), interleukin-21 (IL-21), interleukin-7 (IL-7), or interferon gamma. In some embodiments, the cytokine molecule is a proinflammatory cytokine.

[0871] In certain embodiments, the cytokine is a single chain cytokine. In certain embodiments, the cytokine is a multichain cytokine (e.g., the cytokine comprises 2 or more (e.g., 2) polypeptide chains. An exemplary multichain cytokine is IL-12.

[0872] Examples of useful cytokines include, but are not limited to, GM-CSF, IL-1α, IL-1β, IL-2, IL-3, IL-4, IL-5, IL-6, IL-7, IL-8, IL-10, IL-12, IL-21, IFN-α, IFN-β, IFN-γ, MIP-1α, MIP-1β, TGF-β, TNF-α, and TNFβ. In one embodiment the cytokine of the multispecific or multifunctional polypeptide is a cytokine selected from the group of GM-CSF, IL-2, IL-7, IL-8, IL-10, IL-12, IL-15, IL-21, IFN-α, IFN-γ, MIP-1α, MIP-1p and TGF-β. In one embodiment the cytokine of the multispecific or multifunctional polypeptide is a cytokine selected from the group of IL-2, IL-7, IL-10, IL-12, IL-15, IFN-α, and IFN-γ. In certain embodiments the cytokine is mutated to remove N- and/or O-glycosylation sites. Elimination of glycosylation increases homogeneity of the product obtainable in recombinant production. In certain embodiments, the cytokine is TGF-β. In certain embodiments, the multispecific or multifunctional polypeptide comprises a TGF-β inhibitor.

[0873] In one embodiment, the cytokine of the multispecific or multifunctional polypeptide is IL-2. In a specific embodiment, the IL-2 cytokine can elicit one or more of the cellular responses selected from the group consisting of: proliferation in an activated T lymphocyte cell, differentiation in an activated T lymphocyte cell, cytotoxic T cell (CTL) activity, proliferation in an activated B cell, differentiation in an activated B cell, proliferation in a natural killer (NK) cell, differentiation in a NK cell, cytokine secretion by an activated T cell or an NK cell, and NK/lymphocyte activated killer (LAK) antitumor cytotoxicity. In another particular embodiment the IL-2 cytokine is a mutant IL-2 cytokine having reduced binding affinity to the .alpha.subunit of the IL-2 receptor. Together with the .beta. and .gamma.subunits (also known as CD122 and CD132, respectively), the .alpha.subunit (also known as CD25) forms the heterotrimeric high-affinity IL-2 receptor, while the dimeric receptor consisting only of the β- and γ-subunits is termed the intermediate-affinity IL-2 receptor. As described in PCT patent application number PCT/EP2012/051991, which is incorporated herein by reference in its entirety, a mutant IL-2 polypeptide with reduced binding to the .alpha.subunit of the IL-2 receptor has a reduced ability to induce IL-2 signaling in regulatory T cells, induces less activation-induced cell death (AICD) in T cells, and has a reduced toxicity profile in vivo, compared to a wild-type IL-2 polypeptide. The use of such an cytokine with reduced toxicity is particularly advantageous in a multispecific or multifunctional polypeptide according to the invention, having a long serum half-life due to the presence of an Fc domain. In one embodiment, the mutant IL-2 cytokine of the multispecific or multifunctional polypeptide according to the invention comprises at least one amino acid mutation that reduces or abolishes the affinity of the mutant IL-2 cytokine to the .alpha.subunit of the IL-2 receptor (CD25) but preserves the affinity of the mutant IL-2 cytokine to the intermediate-affinity IL-2 receptor (consisting of the β and γ subunits of the IL-2 receptor), compared to the non-mutated IL-2 cytokine. In one embodiment the one or more amino acid mutations are amino acid substitutions. In a specific embodiment, the mutant IL-2 cytokine comprises one, two or three amino acid substitutions at one, two or three position(s) selected from the positions corresponding to residue 42, 45, and 72 of human IL-2. In a more specific embodiment, the mutant IL-2 cytokine comprises three amino acid substitutions at the positions corresponding to residue 42, 45 and 72 of human IL-2. In an even more specific embodiment, the mutant IL-2 cytokine is human IL-2 comprising the amino acid substitutions F42A, Y45A and L72G. In one embodiment the mutant IL-2 cytokine additionally comprises an amino acid mutation at a position corresponding to position 3 of human IL-2, which eliminates the O-glycosylation site of IL-2. Particularly, said additional amino acid mutation is an amino acid substitution replacing a threonine residue by an alanine residue. A particular mutant IL-2 cytokine useful in the invention comprises four amino acid substitutions at positions corresponding to residues 3, 42, 45 and 72 of human IL-2. Specific amino acid substitutions are T3A, F42A, Y45A and L72G. As demonstrated in PCT patent application number PCT/EP2012/051991 and in the appended Examples, said quadruple mutant IL-2 polypeptide (IL-2 qm) exhibits no detectable binding to CD25, reduced ability to induce apoptosis in T cells, reduced ability to induce IL-2 signaling in T.sub.reg cells, and a reduced toxicity profile in vivo. However, it retains ability to activate IL-2 signaling in effector cells, to induce proliferation of effector cells, and to generate IFN-γ as a secondary cytokine by NK cells.

[0874] The IL-2 or mutant IL-2 cytokine according to any of the above embodiments may comprise additional mutations that provide further advantages such as increased expression or stability. For example, the cysteine at position 125 may be replaced with a neutral amino acid such as alanine, to avoid the formation of disulfide-bridged IL-2 dimers. Thus, in certain embodiments the IL-2 or mutant IL-2 cytokine of the multispecific or multifunctional polypeptide according to the invention comprises an additional amino acid mutation at a position corresponding to residue 125 of human IL-2. In one embodiment said additional amino acid mutation is the amino acid substitution C125A.

[0875] In a specific embodiment, the IL-2 cytokine of the multispecific or multifunctional polypeptide comprises the polypeptide sequence of SEQ ID NO: 6364

[APTSSSTKKTQLQLEHLLLDLQMILNGINNYKNPKLTRMLTFKFYMPK
KATELKHLQCLEEELKPLEEVLNLAQSKNFHLRPRDLISNINVIVLELK
GSETTFMCEYADETATIVEFLNRWITFAQSIISTLT].

In another specific embodiment the IL-2 cytokine of the multispecific or multifunctional polypeptide comprises the polypeptide sequence of SEQ ID NO: 6365

[APASSSTKKTQLQLEHLLLDLQMILNGINNYKNPKLTRMLTAKFAMPK
KATELKHLQCLEEELKPLEEVLNGAQSKNFHLRPRDLISNINVIVLELK
GSETTFMCEYADETATIVEFLNRWITFAQSIISTLT].

[0876] In another embodiment, the cytokine of the multispecific or multifunctional polypeptide is IL-12. In a specific embodiment, said IL-12 cytokine is a single chain IL-12 cytokine. In an even more specific embodiment, the single chain IL-12 cytokine comprises the polypeptide sequence of SEQ ID NO: 6366

[IWELKKDVYVVELDWYPDAPGEMVVLTCDTPEEDGITWTLDQSSEVLG
SGKTLTIQVKEFGDAGQYTCHKGGEVLSHSLLLLHKKEDGIWSTDILKD
QKEPKNKTFLRCEAKNYSGRFTCWWLTTISTDLTFSVKSSRGSSDPQGV
TCGAATLSAERVRGDNKEYEYSVECQEDSACPAAEESLPIEVMVDAVHK
LKYENYTSSFFIRDIIKPDPPKNLQLKPLKNSRQVEVSWEYPDTWSTPH
SYFSLTFCVQVQGKSKREKKDRVFTDKTSATVICRKNASISVRAQDRYY
SSSWSEWASVPCSGGGGSGGGGSGGGGSRNLPVATPDPGMFPCLHHSQN
LLRAVSNMLQKARQTLEFYPCTSEEIDHEDITKDKTSTVEACLPLELTK
NESCLNSRETSFITNGSCLASRKTSFMMALCLSSIYEDLKMYQVEFKTM
NAKLLMDPKRQIFLDQNMLAVIDELMQALNFNSETVPQKSSLEEPDFYK
TKIKLCILLHAFRIRAVTIDRVMSYLNAS].

In one embodiment, the IL-12 cytokine can elicit one or more of the cellular responses selected from the group consisting of: proliferation in a NK cell, differentiation in a NK cell, proliferation in a T cell, and differentiation in a T cell.

[0877] In another embodiment, the cytokine of the multispecific or multifunctional polypeptide is IL-10. In a specific embodiment, said IL-10 cytokine is a single chain IL-10 cytokine. In an even more specific embodiment, the single chain IL-10 cytokine comprises the polypeptide sequence of SEQ ID NO: 6367

[SPGQGTQSENSCTHFPGNLPNMLRDLRDAFSRVKTFFQMKDQLDNLLL
KESLLEDFKGYLGCQALSEMIQFYLEEVMPQAENQDPDIKAHVNSLGEN
LKTLRLRLRRCHRFLPCENKSKAVEQVKNAFNKLQEKGIYKAMSEFDIF
INYIEAYMTMKIRNGGGGSGGGGSGGGGSGGGGSSPGQGTQSENSCTHF
PGNLPNMLRDLRDAFSRVKTFFQMKDQLDNLLLKESLLEDFKGYLGCQA
LSEMIQFYLEEVMPQAENQDPDIKAHVNSLGENLKTLRLRLRRCHRFLP
CENKSKAVEQVKNAFNKLQEKGIYKAMSEFDIFINYIEAYMTMKIRN].

In another specific embodiment, the IL-10 cytokine is a monomeric IL-10 cytokine. In a more specific embodiment, the monomeric IL-10 cytokine comprises the polypeptide sequence of SEQ ID NO: 6368

[SPGQGTQSENSCTHFPGNLPNMLRDLRDAFSRVKTFFQMKDQLDNLLL
KESLLEDFKGYLGCQALSEMIQFYLEEVMPQAENQDPDIKAHVNSLGEN
LKTLRLRLRRCHRFLPCENGGGSGGKSKAVEQVKNAFNKLQEKGIYKAM
SEFDIFINYIEAYMTMKIRN].

In one embodiment, the IL-10 cytokine can elicit one or more of the cellular responses selected from the group consisting of: inhibition of cytokine secretion, inhibition of antigen presentation by antigen presenting cells, reduction of oxygen radical release, and inhibition of T cell proliferation. A multispecific or multifunctional polypeptide according to the invention wherein the cytokine is IL-10 is particularly useful for downregulation of inflammation, e.g. in the treatment of an inflammatory disorder.

[0878] In another embodiment, the cytokine of the multispecific or multifunctional polypeptide is IL-15. In a specific embodiment said IL-15 cytokine is a mutant IL-15 cytokine having reduced binding affinity to the α-subunit of the IL-15 receptor. Without wishing to be bound by theory, a mutant IL-15 polypeptide with reduced binding to the .alpha.subunit of the IL-15 receptor has a reduced ability to bind to fibroblasts throughout the body, resulting in improved pharmacokinetics and toxicity profile, compared to a wild-type IL-15 polypeptide. The use of an cytokine with reduced toxicity, such as the described mutant IL-2 and mutant IL-15 effector moieties, is particularly advantageous in a multispecific or multifunctional polypeptide according to the invention, having a long serum half-life due to the presence of an Fc domain. In one embodiment the mutant IL-15 cytokine of the multispecific or multifunctional polypeptide according to the invention comprises at least one amino acid mutation that reduces or abolishes the affinity of the mutant IL-15 cytokine to the .alpha.subunit of the IL-15 receptor but preserves the affinity of the mutant IL-15 cytokine to the intermediate-affinity IL-15/IL-2 receptor (consisting of the .beta. and .gamma.subunits of the IL-15/IL-2 receptor), compared to the non-mutated IL-15 cytokine. In one embodiment the amino acid mutation is an amino acid substitution. In a specific embodiment, the mutant IL-15 cytokine comprises an amino acid substitution at the position corresponding to residue 53 of human IL-15. In a more specific embodiment, the mutant IL-15 cytokine is human IL-15 comprising the amino acid substitution E53A. In one embodiment the mutant IL-15 cytokine additionally comprises an amino acid mutation at a position corresponding to position 79 of human IL-15, which eliminates the N-glycosylation site of IL-15. Particularly, said additional amino acid mutation is an amino acid substitution replacing an asparagine residue by an alanine residue. In an even more specific embodiment the IL-15 cytokine comprises the polypeptide sequence of SEQ ID NO: 6370 [NWVNVISDLKKIEDLIQSMHIDATLYTESDVHPSCKVTAMKCFLLELQVISLASGDASIHDTVEN LIILANNSLSSNGAVTESGCKECEELEEKNIKEFLQSFVHIVQMFINTS]. In one embodiment, the IL-15 cytokine can elicit one or more of the cellular responses selected from the group consisting of: proliferation in an activated T lymphocyte cell, differentiation in an activated T lymphocyte cell, cytotoxic T cell (CTL) activity, proliferation in an activated B cell, differentiation in an activated B cell, proliferation in a natural killer (NK) cell, differentiation in a NK cell, cytokine secretion by an activated T cell or an NK cell, and NK/lymphocyte activated killer (LAK) antitumor cytotoxicity.

[0879] Mutant cytokine molecules useful as effector moieties in the multispecific or multifunctional polypeptide can be prepared by deletion, substitution, insertion or modification using genetic or chemical methods well known in the art. Genetic methods may include site-specific mutagenesis of the encoding DNA sequence, PCR, gene synthesis, and the like. The correct nucleotide changes can be verified for example by sequencing. Substitution or insertion may involve natural as well as non-natural amino acid residues. Amino acid modification includes well known methods of chemical modification such as the addition or removal of glycosylation sites or carbohydrate attachments, and the like.

[0880] In one embodiment, the cytokine, particularly a single-chain cytokine, of the multispecific or multifunctional polypeptide is GM-CSF. In a specific embodiment, the GM-CSF cytokine can elicit proliferation and/or differentiation in a granulocyte, a monocyte or a dendritic cell. In one embodiment, the cytokine, particularly a single-chain cytokine, of the multispecific or multifunctional polypeptide is IFN-α. In a specific embodiment, the IFN-α cytokine can elicit one or more of the cellular responses selected from the group consisting of: inhibiting viral replication in a virus-infected cell, and upregulating the expression of major histocompatibility complex I (MHC I). In another specific embodiment, the IFN-α cytokine can inhibit proliferation in a tumor cell. In one embodiment the cytokine, particularly a single-chain cytokine, of the multispecific or multifunctional polypeptide is IFNγ. In a specific embodiment, the IFN-γ cytokine can elicit one or more of the cellular responses selected from the group of: increased macrophage activity, increased expression of MHC molecules, and increased NK cell activity. In one embodiment the cytokine, particularly a single-chain cytokine, of the multispecific or multifunctional polypeptide is IL-7. In a specific embodiment, the IL-7 cytokine can elicit proliferation of T and/or B lymphocytes. In one embodiment, the cytokine, particularly a single-chain cytokine, of the multispecific or multifunctional polypeptide is IL-8. In a specific embodiment, the IL-8 cytokine can elicit chemotaxis in neutrophils. In one embodiment, the cytokine, particularly a single-chain cytokine, of the multispecific or multifunctional polypeptide, is MIP-1α. In a specific embodiment, the MIP-1α cytokine can elicit chemotaxis in monocytes and T lymphocyte cells. In one embodiment, the cytokine, particularly a single-chain cytokine, of the multispecific or multifunctional polypeptide is MIP-1β. In a specific embodiment, the MIP-1β cytokine can elicit chemotaxis in monocytes and T lymphocyte cells. In one embodiment, the cytokine, particularly a single-chain cytokine, of the multispecific or multifunctional polypeptide is TGF-β. In a specific embodiment, the TGF-β cytokine can elicit one or more of the cellular responses selected from the group consisting of: chemotaxis in monocytes, chemotaxis in macrophages, upregulation of IL-1 expression in activated macrophages, and upregulation of IgA expression in activated B cells.

[0881] In one embodiment, the multispecific or multifunctional polypeptide of the invention binds to an cytokine receptor with a dissociation constant (K_{D}) that is at least about 1, 1.5, 2, 2.5, 3, 3.5, 4, 4.5, 5, 5.5, 6, 6.5, 7, 7.5, 8, 8.5, 9, 9.5 or 10 times greater than that for a control cytokine. In another embodiment, the multispecific or multifunctional polypeptide binds to an cytokine receptor with a K_{D} that is at least 2, 3, 4, 5, 6, 7, 8, 9, or 10 times greater than that for a corresponding multispecific or multifunctional polypeptide comprising two or more effector moieties. In another embodiment, the multispecific or multifunctional polypeptide binds to an cytokine receptor with a dissociation constant K_{D} that is about 10 times greater than that for a corresponding the multispecific or multifunctional polypeptide comprising two or more cytokines.

[0882] In some embodiments, the multispecific molecules disclosed herein include a cytokine molecule. In some embodiments, the cytokine molecule includes a full length, a fragment or a variant of a cytokine; a cytokine receptor domain, e.g., a cytokine receptor dimerizing domain; or an agonist of a cytokine receptor, e.g., an antibody molecule (e.g., an agonistic antibody) to a cytokine receptor.

[0883] In some embodiments the cytokine molecule is chosen from IL-2, IL-12, IL-15, IL-18, IL-7, IL-21, or interferon gamma, or a fragment or variant thereof, or a combination of any of the aforesaid cytokines. The cytokine molecule can be a monomer or a dimer. In some embodiments, the cytokine molecule can further include a cytokine receptor dimerizing domain.

[0884] In other embodiments, the cytokine molecule is an agonist of a cytokine receptor, e.g., an antibody molecule (e.g., an agonistic antibody) to a cytokine receptor chosen from an IL-15Ra or IL-21R.

[0885] In one embodiment, the cytokine molecule is IL-15, e.g., human IL-15 (e.g., comprising the amino acid sequence.

(SEQ ID NO: 6191)
NWVNVISDLKKIEDLIQSMHIDATLYTESDVHPSCKVTAMKCFLLELQV
ISLESGDASIHDTVENLIILANNSLSSNGNVTESGCKECEELEEKNIKE
FLQSFVHIVQMFINTS,

a fragment thereof, or an amino acid sequence substantially identical thereto (e.g., 95% to 99.9% identical thereto, or having at least one amino acid alteration, but not more than five, ten or fifteen alterations (e.g., substitutions, deletions, or insertions, e.g., conservative substitutions) to the amino acid sequence of SEQ ID NO: 6191.

[0886] In some embodiments, the cytokine molecule comprises a receptor dimerizing domain, e.g., an IL15Ralpha dimerizing domain. In one embodiment, the IL15Ralpha dimerizing domain comprises the amino acid sequence:

(SEQ ID NO: 6192)
MAPRRARGCRTLGLPALLLLLLLRPPATRGITCPPPMSVEHADIWVKSY
SLYSRERYICNSGFKRKAGTSSLTECVL,

a fragment thereof, or an amino acid sequence substantially identical thereto (e.g., 95% to 99.9% identical thereto, or having at least one amino acid alteration, but not more than five, ten or fifteen alterations (e.g., substitutions, deletions, or insertions, e.g., conservative substitutions) to the amino acid sequence of SEQ ID NO: 6192. In some embodiments, the cytokine molecule (e.g., IL-15) and the receptor dimerizing domain (e.g., an IL15Ralpha dimerizing domain) of the multispecific molecule are covalently linked, e.g., via a linker (e.g., a Gly-Ser linker, e.g., a linker comprising the amino acid sequence SGGSGGGGSGGGSGGGGSLQ (SEQ ID NO: 6193). In other embodiments, the cytokine molecule (e.g., IL-15) and the receptor dimerizing domain (e.g., an IL15Ralpha dimerizing domain) of the multispecific molecule are not covalently linked, e.g., are non-covalently associated.

[0887] In other embodiments, the cytokine molecule is IL-2, e.g., human IL-2 (e.g., comprising the amino acid sequence:

(SEQ ID NO: 6194)
APTSSSTKKTQLQLEHLLLDLQMILNGINNYKNPKLTRMLTFKFYMPKK
ATELKHLQCLEEELKPLEEVLNLAQSKNFHLRPRDLISNINVIVLELKG
SETTFMCEYADETATIVEFLNRWITFCQSIISTLT,

a fragment thereof, or an amino acid sequence substantially identical thereto (e.g., 95% to 99.9% identical thereto, or having at least one amino acid alteration, but not more than five, ten or fifteen alterations (e.g., substitutions, deletions, or insertions, e.g., conservative substitutions) to the amino acid sequence of SEQ ID NO:6194).

[0888] In other embodiments, the cytokine molecule is IL-18, e.g., human IL-18 (e.g., comprising the amino acid sequence:

(SEQ ID NO: 6195)
YFGKLESKLSVIRNLNDQVLFIDQGNRPLFEDMTDSDCRDNAPRTIFII
SMYKDSQPRGMAVTISVKCEKISTLSCENKIISFKEMNPPDNIKDTKSD
IIFFQRSVPGHDNKMQFESSSYEGYFLACEKERDLFKLILKKEDELGDR
SIMFTVQNED,

a fragment thereof, or an amino acid sequence substantially identical thereto (e.g., 95% to 99.9% identical thereto, or having at least one amino acid alteration, but not more than five, ten or fifteen alterations (e.g., substitutions, deletions, or insertions, e.g., conservative substitutions) to the amino acid sequence of SEQ ID NO: 6195).

[0889] In other embodiments, the cytokine molecule is IL-21, e.g., human IL-21 (e.g., comprising the amino acid sequence:

(SEQ ID NO: 6196)
QGQDRHMIRMRQLIDIVDQLKNYVNDLVPEFLPAPEDVETNCEWSAFSC
FQKAQLKSANTGNNERIINVSIKKLKRKPPSTNAGRRQKHRLTCPSCDS
YEKKPPKEFLERFKSLLQKMIHQHLSSRTHGSEDS,

a fragment thereof, or an amino acid sequence substantially identical thereto (e.g., 95% to 99.9% identical thereto, or having at least one amino acid alteration, but not more than five, ten or fifteen alterations (e.g., substitutions, deletions, or insertions, e.g., conservative substitutions) to the amino acid sequence of SEQ ID NO: 6196).

[0890] In yet other embodiments, the cytokine molecule is interferon gamma, e.g., human interferon gamma (e.g., comprising the amino acid sequence:

(SEQ ID NO: 6197)
QDPYVKEAENLKKYFNAGHSDVADNGTLFLGILKNWKEESDRKIMQSQI
VSFYFKLFKNFKDDQSIQKSVETIKEDMNVKFFNSNKKKRDDFEKLTNY
SVTDLNVQRKAIHELIQVMAELSPAAKTGKRKRSQMLFRG,

a fragment thereof, or an amino acid sequence substantially identical thereto (e.g., 95% to 99.9% identical thereto, or having at least one amino acid alteration, but not more than five, ten or fifteen alterations (e.g., substitutions, deletions, or insertions, e.g., conservative substitutions) to the amino acid sequence of SEQ ID NO: 6197).

### TGF-β Inhibitor

[0891] In one aspect, provided herein is a multispecific or multifunctional polypeptide (e.g., antibody molecule) comprising a modulator of TGF-β (e.g., a TGF-β inhibitor). In some embodiments, the TGF-β inhibitor binds to and inhibits TGF-β, e.g., reduces the activity of TGF-β. In some embodiments, the TGF-β inhibitor inhibits (e.g., reduces the activity of) TGF-β 1. In some embodiments, the TGF-β inhibitor inhibits (e.g., reduces the activity of) TGF-β 2. In some embodiments, the TGF-β inhibitor inhibits (e.g., reduces the activity of) TGF-β 3. In some embodiments, the TGF-β inhibitor inhibits (e.g., reduces the activity of) TGF-β 1 and TGF-β 3. In some embodiments, the TGF-β inhibitor inhibits (e.g., reduces the activity of) TGF-β 1, TGF-β 2, and TGF-β 3.

[0892] In some embodiments, the TGF-β inhibitor comprises a portion of a TGF-β receptor (e.g., an extracellular domain of a TGF-β receptor) that is capable of inhibiting (e.g., reducing the activity of) TGF-β, or functional fragment or variant thereof. In some embodiments, the TGF-β inhibitor comprises a TGFBR1 polypeptide (e.g., an extracellular domain of TGFBR1 or functional variant thereof). In some embodiments, the TGF-β inhibitor comprises a TGFBR2 polypeptide (e.g., an extracellular domain of TGFBR2 or functional variant thereof). In some embodiments, the TGF-β inhibitor comprises a TGFBR3 polypeptide (e.g., an extracellular domain of TGFBR3 or functional variant thereof). In some embodiments, the TGF-β inhibitor comprises a TGFBR1 polypeptide (e.g., an extracellular domain of TGFBR1 or functional variant thereof) and a TGFBR2 polypeptide (e.g., an extracellular domain of TGFBR2 or functional variant thereof). In some embodiments, the TGF-β inhibitor comprises a TGFBR1 polypeptide (e.g., an extracellular domain of TGFBR1 or functional variant thereof) and a TGFBR3 polypeptide (e.g., an extracellular domain of TGFBR3 or functional variant thereof). In some embodiments, the TGF-β inhibitor comprises a TGFBR2 polypeptide (e.g., an extracellular domain of TGFBR2 or functional variant thereof) and a TGFBR3 polypeptide (e.g., an extracellular domain of TGFBR3 or functional variant thereof).

[0893] Exemplary TGF-β receptor polypeptides that can be used as TGF-β inhibitors have been disclosed in U.S. Pat. Nos. 8,993,524, 9,676,863, 8,658,135, US20150056199, US20070184052, and WO2017037634, all of which are herein incorporated by reference in their entirety.

[0894] In some embodiments, the TGF-β inhibitor comprises an extracellular domain of TGFBR1 or a sequence substantially identical thereto (e.g., a sequence that is at least 80%, 85%, 90%, or 95% identical thereto). In some embodiments, the TGF-β inhibitor comprises an extracellular domain of SEQ ID NO: 6381, or a sequence substantially identical thereto (e.g., a sequence that is at least 80%, 85%, 90%, or 95% identical thereto). In some embodiments, the TGF-β inhibitor comprises an extracellular domain of SEQ ID NO: 6382, or a sequence substantially identical thereto (e.g., a sequence that is at least 80%, 85%, 90%, or 95% identical thereto). In some embodiments, the TGF-β inhibitor comprises an extracellular domain of SEQ ID NO: 6383, or a sequence substantially identical thereto (e.g., a sequence that is at least 80%, 85%, 90%, or 95% identical thereto). In some embodiments, the TGF-β inhibitor comprises the amino acid sequence of SEQ ID NO: 6390, or a sequence substantially identical thereto (e.g., a sequence that is at least 80%, 85%, 90%, or 95% identical thereto). In some embodiments, the TGF-β inhibitor comprises the amino acid sequence of SEQ ID NO: 6391, or a sequence substantially identical thereto (e.g., a sequence that is at least 80%, 85%, 90%, or 95% identical thereto).

[0895] In some embodiments, the TGF-β inhibitor comprises an extracellular domain of TGFBR2 or a sequence substantially identical thereto (e.g., a sequence that is at least 80%, 85%, 90%, or 95% identical thereto). In some embodiments, the TGF-β inhibitor comprises an extracellular domain of SEQ ID NO: 6384, or a sequence substantially identical thereto (e.g., a sequence that is at least 80%, 85%, 90%, or 95% identical thereto). In some embodiments, the TGF-β inhibitor comprises an extracellular domain of SEQ ID NO: 6385, or a sequence substantially identical thereto (e.g., a sequence that is at least 80%, 85%, 90%, or 95% identical thereto). In some embodiments, the TGF-β inhibitor comprises the amino acid sequence of SEQ ID NO: 6386, or a sequence substantially identical thereto (e.g., a sequence that is at least 80%, 85%, 90%, or 95% identical thereto). In some embodiments, the TGF-β inhibitor comprises the amino acid sequence of SEQ ID NO: 6387, or a sequence substantially identical thereto (e.g., a sequence that is at least 80%, 85%, 90%, or 95% identical thereto). In some embodiments, the TGF-β inhibitor comprises the amino acid sequence of SEQ ID NO: 6388, or a sequence substantially identical thereto (e.g., a sequence that is at least 80%, 85%, 90%, or 95% identical thereto). In some embodiments, the TGF-β inhibitor comprises the amino acid sequence of SEQ ID NO: 6389, or a sequence substantially identical thereto (e.g., a sequence that is at least 80%, 85%, 90%, or 95% identical thereto).

[0896] In some embodiments, the TGF-β inhibitor comprises an extracellular domain of TGFBR3 or a sequence substantially identical thereto (e.g., a sequence that is at least 80%, 85%, 90%, or 95% identical thereto). In some embodiments, the TGF-β inhibitor comprises an extracellular domain of SEQ ID NO: 6392, or a sequence substantially identical thereto (e.g., a sequence that is at least 80%, 85%, 90%, or 95% identical thereto). In some embodiments, the TGF-β inhibitor comprises an extracellular domain of SEQ ID NO: 6393, or a sequence substantially identical thereto (e.g., a sequence that is at least 80%, 85%, 90%, or 95% identical thereto). In some embodiments, the TGF-β inhibitor comprises the amino acid sequence of SEQ ID NO: 6394, or a sequence substantially identical thereto (e.g., a sequence that is at least 80%, 85%, 90%, or 95% identical thereto).

[0897] In some embodiments, the TGF-β inhibitor comprises no more than one TGF-β receptor extracellular domain. In some embodiments, the TGF-β inhibitor comprises two or more (e.g., two, three, four, five, or more) TGF-β receptor extracellular domains, linked together, e.g., via a linker.

[0898] In some embodiments, the multispecific molecule comprises a configuration shown in FIGS. 24A-24D. In some embodiments, the TGFRβ inhibitor comprises a TGF-beta receptor ECD homodimer. In some embodiments, the TGFRβ inhibitor comprises a TGF-beta receptor ECD heterodimer. In some embodiments, the two TGFBR ECD domains are linked to two Fc regions, e.g., the C-terminus of two Fc regions. In some embodiments, the two TGFBR ECD domains are linked to CH1 and CL, respectively.

TABLE 37
Exemplary amino acid sequences of TGF-β polypeptides or TGF-β receptor polypeptides

| SEQ ID | | |
|---|---|---|
| NO | Description | Amino acid sequence |
| SEQ ID | Immature | MPPSGLRLLLLLLPLLWLLVLTPGRPAAGLSTCKTIDMELVKRKRIE |
| NO: | human | AIRGQILSKLRLASPPSQGEVPPGPLPEAVLALYNSTRDRVAGESAEP |
| 6378 | TGF-ß 1 | EPEPEADYYAKEVTRVLMVETHNEIYDKFKQSTHSIYMFFNTSELRE |
| | (P01137-1) | AVPEPVLLSRAELRLLRLKLKVEQHVELYQKYSNNSWRYLSNRLLA |
| | | PSDSPEWLSFDVTGVVRQWLSRGGEIEGFRLSAHCSCDSRDNTLQV |
| | | DINGFTTGRRGDLATIHGMNRPFLLLMATPLERAQHLQSSRHRRAL |
| | | DTNYCFSSTEKNCCVRQLYIDFRKDLGWKWIHEPKGYHANFCLGPC |
| | | PYIWSLDTQYSKVLALYNQHNPGASAAPCCVPQALEPLPIVYYVGR |
| | | KPKVEQLSNMIVRSCKCS |
| SEQ ID | Human | LSTCKTIDMELVKRKRIEAIRGQILSKLRLASPPSQGEVPPGPLPEAVL |
| NO: | TGF-ß 1 | ALYNSTRDRVAGESAEPEPEPEADYYAKEVTRVLMVETHNEIYDKF |
| 6395 | (P01137-1) | KQSTHSIYMFFNTSELREAVPEPVLLSRAELRLLRLKLKVEQHVELY |
| | | QKYSNNSWRYLSNRLLAPSDSPEWLSFDVTGVVRQWLSRGGEIEGF |
| | | RLSAHCSCDSRDNTLQVDINGFTTGRRGDLATIHGMNRPFLLLMAT |
| | | PLERAQHLQSSRHRRALDTNYCFSSTEKNCCVRQLYIDFRKDLGWK |
| | | WIHEPKGYHANFCLGPCPYIWSLDTQYSKVLALYNQHNPGASAAPC |
| | | CVPQALEPLPIVYYVGRKPKVEQLSNMIVRSCKCS |
| SEQ ID | Immature | MHYCVLSAFLILHLVTVALSLSTCSTLDMDQFMRKRIEAIRGQILSK |
| NO: | human | LKLTSPPEDYPEPEEVPPEVISIYNSTRDLLQEKASRRAAACERERSD |
| 6379 | TGF-ß 2 | EEYYAKEVYKIDMPPFFPSENAIPPTFYRPYFRIVRFDVSAMEKNASN |
| | (P61812-1) | LVKAEFRVFRLQNPKARVPEQRIELYQILKSKDLTSPTQRYIDSKVV |
| | | KTRAEGEWLSFDVTDAVHEWLHHKDRNLGFKISLHCPCCTFVPSNN |
| | | YIIPNKSEELEARFAGIDGTSTYTSGDQKTIKSTRKKNSGKTPHLLLM |
| | | LLPSYRLESQQTNRRKKRALDAAYCFRNVQDNCCLRPLYIDFKRDL |
| | | GWKWIHEPKGYNANFCAGACPYLWSSDTQHSRVLSLYNTINPEASA |
| | | SPCCVSQDLEPLTILYYIGKTPKIEQLSNMIVKSCKCS |
| SEQ ID | Human | LSTCSTLDMDQFMRKRIEAIRGQILSKLKLTSPPEDYPEPEEVPPEVIS |
| NO: | TGF-ß 2 | IYNSTRDLLQEKASRRAAACERERSDEEYYAKEVYKIDMPPFFPSEN |
| 6396 | (P61812-1) | AIPPTFYRPYFRIVRFDVSAMEKNASNLVKAEFRVFRLQNPKARVPE |
| | | QRIELYQILKSKDLTSPTQRYIDSKVVKTRAEGEWLSFDVTDAVHE |
| | | WLHHKDRNLGFKISLHCPCCTFVPSNNYIIPNKSEELEARFAGIDGTS |
| | | TYTSGDQKTIKSTRKKNSGKTPHLLLMLLPSYRLESQQTNRRKKRA |
| | | LDAAYCFRNVQDNCCLRPLYIDFKRDLGWKWIHEPKGYNANFCAG |
| | | ACPYLWSSDTQHSRVLSLYNTINPEASASPCCVSQDLEPLTILYYIGK |
| | | TPKIEQLSNMIVKSCKCS |
| SEQ ID | Immature | MKMHLQRALVVLALLNFATVSLSLSTCTTLDFGHIKKKRVEAIRGQI |
| NO: | human | LSKLRLTSPPEPTVMTHVPYQVLALYNSTRELLEEMHGEREEGCTQE |
| 6380 | TGF-β 3 | NTESEYYAKEIHKFDMIQGLAEHNELAVCPKGITSKVFRFNVSSVEK |
| | (P10600-1) | NRTNLFRAEFRVLRVPNPSSKRNEQRIELFQILRPDEHIAKQRYIGGK |
| | | NLPTRGTAEWLSFDVTDTVREWLLRRESNLGLEISIHCPCHTFQPNG |
| | | DILENIHEVMEIKFKGVDNEDDHGRGDLGRLKKQKDHHNPHLILM |
| | | MIPPHRLDNPGQGGQRKKRALDTNYCFRNLEENCCVRPLYIDFRQD |
| | | LGWKWVHEPKGYYANFCSGPCPYLRSADTTHSTVLGLYNTLNPEA |
| | | SASPCCVPQDLEPLTILYYVGRTPKVEQLSNMVVKSCKCS |
| SEQ ID | Human | LSTCTTLDFGHIKKKRVEAIRGQILSKLRLTSPPEPTVMTHVPYQVLA |
| NO: | TGF-ß 3 | LYNSTRELLEEMHGEREEGCTQENTESEYYAKEIHKFDMIQGLAEH |
| 6397 | (P10600-1) | NELAVCPKGITSKVFRFNVSSVEKNRTNLFRAEFRVLRVPNPSSKRN |
| | | EQRIELFQILRPDEHIAKQRYIGGKNLPTRGTAEWLSFDVTDTVREW |
| | | LLRRESNLGLEISIHCPCHTFQPNGDILENIHEVMEIKFKGVDNEDDH |
| | | GRGDLGRLKKQKDHHNPHLILMMIPPHRLDNPGQGGQRKKRALDT |
| | | NYCFRNLEENCCVRPLYIDFRQDLGWKWVHEPKGYYANFCSGPCP |
| | | YLRSADTTHSTVLGLYNTLNPEASASPCCVPQDLEPLTILYYVGRTP |
| | | KVEQLSNMVVKSCKCS |
| SEQ ID | Immature | MEAAVAAPRPRLLLLVLAAAAAAAAALLPGATALQCFCHLCTKDN |
| NO: | human | FTCVTDGLCFVSVTETTDKVIHNSMCIAEIDLIPRDRPFVCAPSSKTG |
| 6381 | TGFBR1 | SVTTTYCCNQDHCNKIELPTTVKSSPGLGPVELAAVIAGPVCFVCISL |
| | isoform 1 | MLMVYICHNRTVIHHRVPNEEDPSLDRPFISEGTTLKDLIYDMTTSG |
| | (P36897-1) | SGSGLPLLVQRTIARTIVLQESIGKGRFGEVWRGKWRGEEVAVKIFS |
| | | SREERSWFREAEIYQTVMLRHENILGFIAADNKDNGTWTQLWLVSD |
| | | YHEHGSLFDYLNRYTVTVEGMIKLALSTASGLAHLHMEIVGTQGKP |
| | | AIAHRDLKSKNILVKKNGTCCIADLGLAVRHDSATDTIDIAPNHRVG |
| | | TKRYMAPEVLDDSINMKHFESFKRADIYAMGLVFWEIARRCSIGGIH |
| | | EDYQLPYYDLVPSDPSVEEMRKVVCEQKLRPNIPNRWQSCEALRV |
| | | MAKIMRECWYANGAARLTALRIKKTLSQLSQQEGIKM |
| SEQ ID | Human | LQCFCHLCTKDNFTCVTDGLCFVSVTETTDKVIHNSMCIAEIDLIPRD |
| NO: | TGFBR1 | RPFVCAPSSKTGSVTTTYCCNQDHCNKIELPTTVKSSPGLGPVELAA |
| 6398 | isoform 1 | VIAGPVCFVCISLMLMVYICHNRTVIHHRVPNEEDPSLDRPFISEGTT |
| | (P36897-1) | LKDLIYDMTTSGSGSGLPLLVQRTIARTIVLQESIGKGRFGEVWRGK |
| | | WRGEEVAVKIFSSREERSWFREAEIYQTVMLRHENILGFIAADNKDN |
| | | GTWTQLWLVSDYHEHGSLFDYLNRYTVTVEGMIKLALSTASGLAH |
| | | LHMEIVGTQGKPAIAHRDLKSKNILVKKNGTCCIADLGLAVRHDSA |
| | | TDTIDIAPNHRVGTKRYMAPEVLDDSINMKHFESFKRADIYAMGLV |
| | | FWEIARRCSIGGIHEDYQLPYYDLVPSDPSVEEMRKVVCEQKLRPNI |
| | | PNRWQSCEALRVMAKIMRECWYANGAARLTALRIKKTLSQLSQQE |
| | | GIKM |
| SEQ ID | Immature | MEAAVAAPRPRLLLLVLAAAAAAAAALLPGATALQCFCHLCTKDN |
| NO: | human | FTCVTDGLCFVSVTETTDKVIHNSMCIAEIDLIPRDRPFVCAPSSKTG |
| 6382 | TGFBR1 | SVTTTYCCNQDHCNKIELPTTGPFSVKSSPGLGPVELAAVIAGPVCF |
| | isoform 2 | VCISLMLMVYICHNRTVIHHRVPNEEDPSLDRPFISEGTTLKDLIYDM |
| | (P36897-2) | TTSGSGSGLPLLVQRTIARTIVLQESIGKGRFGEVWRGKWRGEEVAV |
| | | KIFSSREERSWFREAEIYQTVMLRHENILGFIAADNKDNGTWTQLWL |
| | | VSDYHEHGSLFDYLNRYTVTVEGMIKLALSTASGLAHLHMEIVGTQ |
| | | GKPAIAHRDLKSKNILVKKNGTCCIADLGLAVRHDSATDTIDIAPNH |
| | | RVGTKRYMAPEVLDDSINMKHFESFKRADIYAMGLVFWEIARRCSI |
| | | GGIHEDYQLPYYDLVPSDPSVEEMRKVVCEQKLRPNIPNRWQSCEA |
| | | LRVMAKIMRECWYANGAARLTALRIKKTLSQLSQQEGIKM |
| SEQ ID | Human | LQCFCHLCTKDNFTCVTDGLCFVSVTETTDKVIHNSMCIAEIDLIPRD |
| NO: | TGFBR1 | RPFVCAPSSKTGSVTTTYCCNQDHCNKIELPTTGPFSVKSSPGLGPVE |
| 6399 | isoform 2 | LAAVIAGPVCFVCISLMLMVYICHNRTVIHHRVPNEEDPSLDRPFISE |
| | (P36897-2) | GTTLKDLIYDMTTSGSGSGLPLLVQRTIARTIVLQESIGKGRFGEVW |
| | | RGKWRGEEVAVKIFSSREERSWFREAEIYQTVMLRHENILGFIAADN |
| | | KDNGTWTQLWLVSDYHEHGSLFDYLNRYTVTVEGMIKLALSTASG |
| | | LAHLHMEIVGTQGKPAIAHRDLKSKNILVKKNGTCCIADLGLAVRH |
| | | DSATDTIDIAPNHRVGTKRYMAPEVLDDSINMKHFESFKRADIYAM |
| | | GLVFWEIARRCSIGGIHEDYQLPYYDLVPSDPSVEEMRKVVCEQKLR |
| | | PNIPNRWQSCEALRVMAKIMRECWYANGAARLTALRIKKTLSQLSQ |
| | | QEGIKM |
| SEQ ID | Immature | MEAAVAAPRPRLLLLVLAAAAAAAAALLPGATALQCFCHLCTKDN |
| NO: | human | FTCVTDGLCFVSVTETTDKVIHNSMCIAEIDLIPRDRPFVCAPSSKTG |
| 6383 | TGFBR1 | SVTTTYCCNQDHCNKIELPTTGLPLLVQRTIARTIVLQESIGKGRFGE |
| | isoform 3 | VWRGKWRGEEVAVKIFSSREERSWFREAEIYQTVMLRHENILGFIA |
| | (P36897-3) | ADNKDNGTWTQLWLVSDYHEHGSLFDYLNRYTVTVEGMIKLALST |
| | | ASGLAHLHMEIVGTQGKPAIAHRDLKSKNILVKKNGTCCIADLGLA |
| | | VRHDSATDTIDIAPNHRVGTKRYMAPEVLDDSINMKHFESFKRADIY |
| | | AMGLVFWEIARRCSIGGIHEDYQLPYYDLVPSDPSVEEMRKVVCEQ |
| | | KLRPNIPNRWQSCEALRVMAKIMRECWYANGAARLTALRIKKTLS |
| | | QLSQQEGIKM |
| SEQ ID | Human | LQCFCHLCTKDNFTCVTDGLCFVSVTETTDKVIHNSMCIAEIDLIPRD |
| NO: | TGFBR1 | RPFVCAPSSKTGSVTTTYCCNQDHCNKIELPTTGLPLLVQRTIARTIV |
| 6400 | isoform 3 | LQESIGKGRFGEVWRGKWRGEEVAVKIFSSREERSWFREAEIYQTV |
| | (P36897-3) | MLRHENILGFIAADNKDNGTWTQLWLVSDYHEHGSLFDYLNRYTV |
| | | TVEGMIKLALSTASGLAHLHMEIVGTQGKPAIAHRDLKSKNILVKK |
| | | NGTCCIADLGLAVRHDSATDTIDIAPNHRVGTKRYMAPEVLDDSIN |
| | | MKHFESFKRADIYAMGLVFWEIARRCSIGGIHEDYQLPYYDLVPSDP |
| | | SVEEMRKVVCEQKLRPNIPNRWQSCEALRVMAKIMRECWYANGA |
| | | ARLTALRIKKTLSQLSQQEGIKM |
| SEQ ID | Human | LQCFCHLCTKDNFTCVTDGLCFVSVTETTDKVIHNSMCIAEIDLIPRD |
| NO: | TGFBR1 | RPFVCAPSSKTGSVTTTYCCNQDHCNKIELPTTVKSSPGLGPVEL |
| 6390 | fragment 1 | |
| SEQ ID | Human | ALQCFCHLCTKDNFTCVTDGLCFVSVTETTDKVIHNSMCIAEIDLIPR |
| NO: | TGFBR1 | DRPFVCAPSSKTGSVTTTYCCNQDHCNKIEL |
| 6391 | fragment 2 | |
| SEQ ID | Immature | MGRGLLRGLWPLHIVLWTRIASTIPPHVQKSVNNDMIVTDNNGAVK |
| NO: | human | FPQLCKFCDVRFSTCDNQKSCMSNCSITSICEKPQEVCVAVWRKND |
| 6384 | TGFBR2 | ENITLETVCHDPKLPYHDFILEDAASPKCIMKEKKKPGETFFMCSCSS |
| | isoform B | DECNDNIIFSEEYNTSNPDLLLVIFQVTGISLLPPLGVAISVIIIFYCYRV |
| | (short | NRQQKLSSTWETGKTRKLMEFSEHCAIILEDDRSDISSTCANNINHN |
| | isoform) | TELLPIELDTLVGKGRFAEVYKAKLKQNTSEQFETVAVKIFPYEEYA |
| | (P37173-1) | SWKTEKDIFSDINLKHENILQFLTAEERKTELGKQYWLITAFHAKGN |
| | | LQEYLTRHVISWEDLRKLGSSLARGIAHLHSDHTPCGRPKMPIVHRD |
| | | LKSSNILVKNDLTCCLCDFGLSLRLDPTLSVDDLANSGQVGTARYM |
| | | APEVLESRMNLENVESFKQTDVYSMALVLWEMTSRCNAVGEVKD |
| | | YEPPFGSKVREHPCVESMKDNVLRDRGRPEIPSFWLNHQGIQMVCE |
| | | TLTECWDHDPEARLTAQCVAERFSELEHLDRLSGRSCSEEKIPEDGS |
| | | LNTTK |
| SEQ ID | Human | TIPPHVQKSVNNDMIVTDNNGAVKFPQLCKFCDVRFSTCDNQKSCM |
| NO: | TGFBR2 | SNCSITSICEKPQEVCVAVWRKNDENITLETVCHDPKLPYHDFILEDA |
| 6401 | isoform B | ASPKCIMKEKKKPGETFFMCSCSSDECNDNIIFSEEYNTSNPDLLLVIF |
| | (short | QVTGISLLPPLGVAISVIIIFYCYRVNRQQKLSSTWETGKTRKLMEFS |
| | isoform) | EHCAIILEDDRSDISSTCANNINHNTELLPIELDTLVGKGRFAEVYKA |
| | (P37173-1) | KLKQNTSEQFETVAVKIFPYEEYASWKTEKDIFSDINLKHENILQFLT |
| | | AEERKTELGKQYWLITAFHAKGNLQEYLTRHVISWEDLRKLGSSLA |
| | | RGIAHLHSDHTPCGRPKMPIVHRDLKSSNILVKNDLTCCLCDFGLSL |
| | | RLDPTLSVDDLANSGQVGTARYMAPEVLESRMNLENVESFKQTDV |
| | | YSMALVLWEMTSRCNAVGEVKDYEPPFGSKVREHPCVESMKDNVL |
| | | RDRGRPEIPSFWLNHQGIQMVCETLTECWDHDPEARLTAQCVAERF |
| | | SELEHLDRLSGRSCSEEKIPEDGSLNTTK |
| SEQ ID | Immature | MGRGLLRGLWPLHIVLWTRIASTIPPHVQKSDVEMEAQKDEIICPSC |
| NO: | human | NRTAHPLRHINNDMIVTDNNGAVKFPQLCKFCDVRFSTCDNQKSCM |
| 6385 | TGFBR2 | SNCSITSICEKPQEVCVAVWRKNDENITLETVCHDPKLPYHDFILEDA |
| | isoform A | ASPKCIMKEKKKPGETFFMCSCSSDECNDNIIFSEEYNTSNPDLLLVIF |
| | (long | QVTGISLLPPLGVAISVIIIFYCYRVNRQQKLSSTWETGKTRKLMEFS |
| | isoform) | EHCAIILEDDRSDISSTCANNINHNTELLPIELDTLVGKGRFAEVYKA |
| | (P37173-2) | KLKQNTSEQFETVAVKIFPYEEYASWKTEKDIFSDINLKHENILQFLT |
| | | AEERKTELGKQYWLITAFHAKGNLQEYLTRHVISWEDLRKLGSSLA |
| | | RGIAHLHSDHTPCGRPKMPIVHRDLKSSNILVKNDLTCCLCDFGLSL |
| | | RLDPTLSVDDLANSGQVGTARYMAPEVLESRMNLENVESFKQTDV |
| | | YSMALVLWEMTSRCNAVGEVKDYEPPFGSKVREHPCVESMKDNVL |
| | | RDRGRPEIPSFWLNHQGIQMVCETLTECWDHDPEARLTAQCVAERF |
| | | SELEHLDRLSGRSCSEEKIPEDGSLNTTK |
| SEQ ID | Human | TIPPHVQKSDVEMEAQKDEIICPSCNRTAHPLRHINNDMIVTDNNGA |
| NO: | TGFBR2 | VKFPQLCKFCDVRFSTCDNQKSCMSNCSITSICEKPQEVCVAVWRK |
| 6402 | isoform A | NDENITLETVCHDPKLPYHDFILEDAASPKCIMKEKKKPGETFFMCS |
| | (long | CSSDECNDNIIFSEEYNTSNPDLLLVIFQVTGISLLPPLGVAISVIIIFYC |
| | isoform) | YRVNRQQKLSSTWETGKTRKLMEFSEHCAIILEDDRSDISSTCANNI |
| | (P37173-2) | NHNTELLPIELDTLVGKGRFAEVYKAKLKQNTSEQFETVAVKIFPYE |
| | | EYASWKTEKDIFSDINLKHENILQFLTAEERKTELGKQYWLITAFHA |
| | | KGNLQEYLTRHVISWEDLRKLGSSLARGIAHLHSDHTPCGRPKMPIV |
| | | HRDLKSSNILVKNDLTCCLCDFGLSLRLDPTLSVDDLANSGQVGTA |
| | | RYMAPEVLESRMNLENVESFKQTDVYSMALVLWEMTSRCNAVGE |
| | | VKDYEPPFGSKVREHPCVESMKDNVLRDRGRPEIPSFWLNHQGIQM |
| | | VCETLTECWDHDPEARLTAQCVAERFSELEHLDRLSGRSCSEEKIPE |
| | | DGSLNTTK |
| SEQ ID | Human | TIPPHVQKSVNNDMIVTDNNGAVKFPQLCKFCDVRFSTCDNQKSCM |
| NO: | TGFBR2 | SNCSITSICEKPQEVCVAVWRKNDENITLETVCHDPKLPYHDFILEDA |
| 6386 | fragment 1 | ASPKCIMKEKKKPGETFFMCSCSSDECNDNIIFSEEYNTSNPD |
| | (ECD of | |
| | human | |
| | TGFBR2 | |
| | isoform B) | |
| SEQ ID | Human | IPPHVQKSVNNDMIVTDNNGAVKFPQLCKFCDVRFSTCDNQKSCMS |
| NO: | TGFBR2 | NCSITSICEKPQEVCVAVWRKNDENITLETVCHDPKLPYHDFILEDA |
| 6387 | fragment 2 | ASPKCIMKEKKKPGETFFMCSCSSDECNDNIIFSEEYNTSNPD |
| SEQ ID | Human | TIPPHVQKSDVEMEAQKDEIICPSCNRTAHPLRHINNDMIVTDNNGA |
| NO: | TGFBR2 | VKFPQLCKFCDVRFSTCDNQKSCMSNCSITSICEKPQEVCVAVWRK |
| 6388 | fragment 3 | NDENITLETVCHDPKLPYHDFILEDAASPKCIMKEKKKPGETFFMCS |
| | (ECD of | CSSDECNDNIIFSEEYNTSNPD |
| | human | |
| | TGFBR2 | |
| | isoform A) | |
| SEQ ID | Human | QLCKFCDVRFSTCDNQKSCMSNCSITSICEKPQEVCVAVWRKNDENI |
| NO: | TGFBR2 | TLETVCHDPKLPYHDFILEDAASPKCIMKEKKKPGETFFMCSCSSDE |
| 6389 | fragment 4 | CNDNIIF |
| SEQ ID | Immature | MTSHYVIAIFALMSSCLATAGPEPGALCELSPVSASHPVQALMESFT |
| NO: | human | VLSGCASRGTTGLPQEVHVLNLRTAGQGPGQLQREVTLHLNPISSV |
| 6392 | TGFBR3 | HIHHKSVVFLLNSPHPLVWHLKTERLATGVSRLFLVSEGSVVQFSSA |
| | isoform 1 | NFSLTAETEERNFPHGNEHLLNWARKEYGAVTSFTELKIARNIYIKV |
| | (Q03167-1) | GEDQVFPPKCNIGKNFLSLNYLAEYLQPKAAEGCVMSSQPQNEEVH |
| | | IIELITPNSNPYSAFQVDITIDIRPSQEDLEVVKNLILILKCKKSVNWVI |
| | | KSFDVKGSLKIIAPNSIGFGKESERSMTMTKSIRDDIPSTQGNLVKWA |
| | | LDNGYSPITSYTMAPVANRFHLRLENNAEEMGDEEVHTIPPELRILL |
| | | DPGALPALQNPPIRGGEGQNGGLPFPFPDISRRVWNEEGEDGLPRPK |
| | | DPVIPSIQLFPGLREPEEVQGSVDIALSVKCDNEKMIVAVEKDSFQAS |
| | | GYSGMDVTLLDPTCKAKMNGTHFVLESPLNGCGTRPRWSALDGVV |
| | | YYNSIVIQVPALGDSSGWPDGYEDLESGDNGFPGDMDEGDASLFTR |
| | | PEIVVFNCSLQQVRNPSSFQEQPHGNITFNMELYNTDLFLVPSQGVFS |
| | | VPENGHVYVEVSVTKAEQELGFAIQTCFISPYSNPDRMSHYTIIENIC |
| | | PKDESVKFYSPKRVHFPIPQADMDKKRFSFVFKPVFNTSLLFLQCEL |
| | | TLCTKMEKHPQKLPKCVPPDEACTSLDASIIWAMMQNKKTFTKPLA |
| | | VIHHEAESKEKGPSMKEPNPISPPIFHGLDTLTVMGIAFAAFVIGALL |
| | | TGALWYIYSHTGETAGRQQVPTSPPASENSSAAHSIGSTQSTPCSSSS |
| | | TA |
| SEQ ID | Human | GPEPGALCELSPVSASHPVQALMESFTVLSGCASRGTTGLPQEVHVL |
| NO: | TGFBR3 | NLRTAGQGPGQLQREVTLHLNPISSVHIHHKSVVFLLNSPHPLVWHL |
| 6403 | isoform 1 | KTERLATGVSRLFLVSEGSVVQFSSANFSLTAETEERNFPHGNEHLL |
| | (Q03167-1) | NWARKEYGAVTSFTELKIARNIYIKVGEDQVFPPKCNIGKNFLSLNY |
| | | LAEYLQPKAAEGCVMSSQPQNEEVHIIELITPNSNPYSAFQVDITIDIR |
| | | PSQEDLEVVKNLILILKCKKSVNWVIKSFDVKGSLKIIAPNSIGFGKES |
| | | ERSMTMTKSIRDDIPSTQGNLVKWALDNGYSPITSYTMAPVANRFH |
| | | LRLENNAEEMGDEEVHTIPPELRILLDPGALPALQNPPIRGGEGQNG |
| | | GLPFPFPDISRRVWNEEGEDGLPRPKDPVIPSIQLFPGLREPEEVQGSV |
| | | DIALSVKCDNEKMIVAVEKDSFQASGYSGMDVTLLDPTCKAKMNG |
| | | THFVLESPLNGCGTRPRWSALDGVVYYNSIVIQVPALGDSSGWPDG |
| | | YEDLESGDNGFPGDMDEGDASLFTRPEIVVFNCSLQQVRNPSSFQEQ |
| | | PHGNITFNMELYNTDLFLVPSQGVFSVPENGHVYVEVSVTKAEQEL |
| | | GFAIQTCFISPYSNPDRMSHYTIIENICPKDESVKFYSPKRVHFPIPQA |
| | | DMDKKRFSFVFKPVFNTSLLFLQCELTLCTKMEKHPQKLPKCVPPD |
| | | EACTSLDASIIWAMMQNKKTFTKPLAVIHHEAESKEKGPSMKEPNPI |
| | | SPPIFHGLDTLTVMGIAFAAFVIGALLTGALWYIYSHTGETAGRQQV |
| | | PTSPPASENSSAAHSIGSTQSTPCSSSSTA |
| SEQ ID | Immature | MTSHYVIAIFALMSSCLATAGPEPGALCELSPVSASHPVQALMESFT |
| NO: | human | VLSGCASRGTTGLPQEVHVLNLRTAGQGPGQLQREVTLHLNPISSV |
| 6393 | TGFBR3 | HIHHKSVVFLLNSPHPLVWHLKTERLATGVSRLFLVSEGSVVQFSSA |
| | isoform 2 | NFSLTAETEERNFPHGNEHLLNWARKEYGAVTSFTELKIARNIYIKV |
| | (Q03167-2) | GEDQVFPPKCNIGKNFLSLNYLAEYLQPKAAEGCVMSSQPQNEEVH |
| | | IIELITPNSNPYSAFQVDITIDIRPSQEDLEVVKNLILILKCKKSVNWVI |
| | | KSFDVKGSLKIIAPNSIGFGKESERSMTMTKSIRDDIPSTQGNLVKWA |
| | | LDNGYSPITSYTMAPVANRFHLRLENNEEMGDEEVHTIPPELRILLDP |
| | | GALPALQNPPIRGGEGQNGGLPFPFPDISRRVWNEEGEDGLPRPKDP |
| | | VIPSIQLFPGLREPEEVQGSVDIALSVKCDNEKMIVAVEKDSFQASGY |
| | | SGMDVTLLDPTCKAKMNGTHFVLESPLNGCGTRPRWSALDGVVYY |
| | | NSIVIQVPALGDSSGWPDGYEDLESGDNGFPGDMDEGDASLFTRPEI |
| | | VVFNCSLQQVRNPSSFQEQPHGNITFNMELYNTDLFLVPSQGVFSVP |
| | | ENGHVYVEVSVTKAEQELGFAIQTCFISPYSNPDRMSHYTIIENICPK |
| | | DESVKFYSPKRVHFPIPQADMDKKRFSFVFKPVFNTSLLFLQCELTL |
| | | CTKMEKHPQKLPKCVPPDEACTSLDASIIWAMMQNKKTFTKPLAVI |
| | | HHEAESKEKGPSMKEPNPISPPIFHGLDTLTVMGIAFAAFVIGALLTG |
| | | ALWYIYSHTGETAGRQQVPTSPPASENSSAAHSIGSTQSTPCSSSSTA |
| SEQ ID | Human | GPEPGALCELSPVSASHPVQALMESFTVLSGCASRGTTGLPQEVHVL |
| NO: | TGFBR3 | NLRTAGQGPGQLQREVTLHLNPISSVHIHHKSVVFLLNSPHPLVWHL |
| 6404 | isoform 2 | KTERLATGVSRLFLVSEGSVVQFSSANFSLTAETEERNFPHGNEHLL |
| | (Q03167-2) | NWARKEYGAVTSFTELKIARNIYIKVGEDQVFPPKCNIGKNFLSLNY |
| | | LAEYLQPKAAEGCVMSSQPQNEEVHIIELITPNSNPYSAFQVDITIDIR |
| | | PSQEDLEVVKNLILILKCKKSVNWVIKSFDVKGSLKIIAPNSIGFGKES |
| | | ERSMTMTKSIRDDIPSTQGNLVKWALDNGYSPITSYTMAPVANRFH |
| | | LRLENNEEMGDEEVHTIPPELRILLDPGALPALQNPPIRGGEGQNGG |
| | | LPFPFPDISRRVWNEEGEDGLPRPKDPVIPSIQLFPGLREPEEVQGSVD |
| | | IALSVKCDNEKMIVAVEKDSFQASGYSGMDVTLLDPTCKAKMNGT |
| | | HFVLESPLNGCGTRPRWSALDGVVYYNSIVIQVPALGDSSGWPDGY |
| | | EDLESGDNGFPGDMDEGDASLFTRPEIVVFNCSLQQVRNPSSFQEQP |
| | | HGNITFNMELYNTDLFLVPSQGVFSVPENGHVYVEVSVTKAEQELG |
| | | FAIQTCFISPYSNPDRMSHYTIIENICPKDESVKFYSPKRVHFPIPQAD |
| | | MDKKRFSFVFKPVFNTSLLFLQCELTLCTKMEKHPQKLPKCVPPDE |
| | | ACTSLDASIIWAMMQNKKTFTKPLAVIHHEAESKEKGPSMKEPNPIS |
| | | PPIFHGLDTLTVMGIAFAAFVIGALLTGALWYIYSHTGETAGRQQVP |
| | | TSPPASENSSAAHSIGSTQSTPCSSSSTA |
| SEQ ID | Human | GPEPGALCELSPVSASHPVQALMESFTVLSGCASRGTTGLPQEVHVL |
| NO: | TGFBR3 | NLRTAGQGPGQLQREVTLHLNPISSVHIHHKSVVFLLNSPHPLVWHL |
| 6394 | fragment 1 | KTERLATGVSRLFLVSEGSVVQFSSANFSLTAETEERNFPHGNEHLL |
| | | NWARKEYGAVTSFTELKIARNIYIKVGEDQVFPPKCNIGKNFLSLNY |
| | | LAEYLQPKAAEGCVMSSQPQNEEVHIIELITPNSNPYSAFQVDITIDIR |
| | | PSQEDLEVVKNLILILKCKKSVNWVIKSFDVKGSLKIIAPNSIGFGKES |
| | | ERSMTMTKSIRDDIPSTQGNLVKWALDNGYSPITSYTMAPVANRFH |
| | | LRLENNAEEMGDEEVHTIPPELRILLDPGALPALQNPPIRGGEGQNG |
| | | GLPFPFPDISRRVWNEEGEDGLPRPKDPVIPSIQLFPGLREPEEVQGSV |
| | | DIALSVKCDNEKMIVAVEKDSFQASGYSGMDVTLLDPTCKAKMNG |
| | | THFVLESPLNGCGTRPRWSALDGVVYYNSIVIQVPALGDSSGWPDG |
| | | YEDLESGDNGFPGDMDEGDASLFTRPEIVVFNCSLQQVRNPSSFQEQ |
| | | PHGNITFNMELYNTDLFLVPSQGVFSVPENGHVYVEVSVTKAEQEL |
| | | GFAIQTCFISPYSNPDRMSHYTIIENICPKDESVKFYSPKRVHFPIPQA |
| | | DMDKKRFSFVFKPVFNTSLLFLQCELTLCTKMEKHPQKLPKCVPPD |
| | | EACTSLDASIIWAMMQNKKTFTKPLAVIHHEAESKEKGPSMKEPNPI |
| | | SPPIFHGLDTLTV |
| SEQ ID | hCH1- | ASTKGPSVFPLAPSSKSTSGGTAALGCLVKDYFPEPVTVSWNSGALT |
| NO: | hFc_Hole- | SGVHTFPAVLQSSGLYSLSSVVTVPSSSLGTQTYICNVNHKPSNTKV |
| 6405 | 3x4GS- | DKRVEPKSCDKTHTCPPCPAPELLGGPSVFLFPPKPKDTLMISRTPEV |
| | TGFbR2 | TCVVVDVSHEDPEVKFNWYVDGVEVHNAKTKPREEQYNSTYRVVS |
| | | VLTVLHQDWLNGKEYKCKVSNKALPAPIEKTISKAKGQPREPQVCT |
| | | LPPSREEMTKNQVSLSCAVKGFYPSDIAVEWESNGQPENNYKTTPP |
| | | VLDSDGSFFLVSKLTVDKSRWQQGNVFSCSVMHEALHNHYTQKSL |
| | | SLSPGXGGGGSGGGGSGGGGSIPPHVQKSVNNDMIVTDNNGAVKFP |
| | | QLCKFCDVRFSTCDNQKSCMSNCSITSICEKPQEVCVAVWRKNDENI |
| | | TLETVCHDPKLPYHDFILEDAASPKCIMKEKKKPGETFFMCSCSSDE |
| | | CNDNIIFSEEYNTSNPD, wherein X is K or absent |
| SEQ ID | hCH1- | ASTKGPSVFPLAPSSKSTSGGTAALGCLVKDYFPEPVTVSWNSGALT |
| NO: | hFc_Knob- | SGVHTFPAVLQSSGLYSLSSVVTVPSSSLGTQTYICNVNHKPSNTKV |
| 6406 | 3x4GS- | DKRVEPKSCDKTHTCPPCPAPELLGGPSVFLFPPKPKDTLMISRTPEV |
| | TGFbR2 | TCVVVDVSHEDPEVKFNWYVDGVEVHNAKTKPREEQYNSTYRVVS |
| | | VLTVLHQDWLNGKEYKCKVSNKALPAPIEKTISKAKGQPREPQVYT |
| | | LPPCREEMTKNQVSLWCLVKGFYPSDIAVEWESNGQPENNYKTTPP |
| | | VLDSDGSFFLYSKLTVDKSRWQQGNVFSCSVMHEALHNHYTQKSL |
| | | SLSPGXGGGGSGGGGSGGGGSIPPHVQKSVNNDMIVTDNNGAVKFP |
| | | QLCKFCDVRFSTCDNQKSCMSNCSITSICEKPQEVCVAVWRKNDENI |
| | | TLETVCHDPKLPYHDFILEDAASPKCIMKEKKKPGETFFMCSCSSDE |
| | | CNDNIIFSEEYNTSNPD, wherein X is K or absent |
| SEQ ID | hFc_Hole- | DKTHTCPPCPAPELLGGPSVFLFPPKPKDTLMISRTPEVTCVVVDVSH |
| NO: | 3x4GS- | EDPEVKFNWYVDGVEVHNAKTKPREEQYNSTYRVVSVLTVLHQD |
| 6407 | TGFbR2 | WLNGKEYKCKVSNKALPAPIEKTISKAKGQPREPQVCTLPPSREEMT |
| | | KNQVSLSCAVKGFYPSDIAVEWESNGQPENNYKTTPPVLDSDGSFFL |
| | | VSKLTVDKSRWQQGNVFSCSVMHEALHNHYTQKSLSLSPGXGGGG |
| | | SGGGGSGGGGSIPPHVQKSVNNDMIVTDNNGAVKFPQLCKFCDVRF |
| | | STCDNQKSCMSNCSITSICEKPQEVCVAVWRKNDENITLETVCHDPK |
| | | LPYHDFILEDAASPKCIMKEKKKPGETFFMCSCSSDECNDNIIFSEEY |
| | | NTSNPD, wherein X is K or absent |
| SEQ ID | hFc_Knob- | DKTHTCPPCPAPELLGGPSVFLFPPKPKDTLMISRTPEVTCVVVDVSH |
| NO: | 3x4GS- | EDPEVKFNWYVDGVEVHNAKTKPREEQYNSTYRVVSVLTVLHQD |
| 6408 | TGFbR2 | WLNGKEYKCKVSNKALPAPIEKTISKAKGQPREPQVYTLPPCREEM |
| | | TKNQVSLWCLVKGFYPSDIAVEWESNGQPENNYKTTPPVLDSDGSF |
| | | FLYSKLTVDKSRWQQGNVFSCSVMHEALHNHYTQKSLSLSPGXGG |
| | | GGSGGGGSGGGGSIPPHVQKSVNNDMIVTDNNGAVKFPQLCKFCD |
| | | VRFSTCDNQKSCMSNCSITSICEKPQEVCVAVWRKNDENITLETVCH |
| | | DPKLPYHDFILEDAASPKCIMKEKKKPGETFFMCSCSSDECNDNIIFS |
| | | EEYNTSNPD, wherein X is K or absent |
| SEQ ID | TGFbR2- | IPPHVQKSVNNDMIVTDNNGAVKFPQLCKFCDVRFSTCDNQKSCMS |
| NO: | 3x4GS- | NCSITSICEKPQEVCVAVWRKNDENITLETVCHDPKLPYHDFILEDA |
| 6409 | hCH1- | ASPKCIMKEKKKPGETFFMCSCSSDECNDNIIFSEEYNTSNPDGGGGS |
| | hFc_Hole | GGGGSGGGGSASTKGPSVFPLAPSSKSTSGGTAALGCLVKDYFPEPV |
| | | TVSWNSGALTSGVHTFPAVLQSSGLYSLSSVVTVPSSSLGTQTYICN |
| | | VNHKPSNTKVDKRVEPKSCDKTHTCPPCPAPELLGGPSVFLFPPKPK |
| | | DTLMISRTPEVTCVVVDVSHEDPEVKFNWYVDGVEVHNAKTKPRE |
| | | EQYNSTYRVVSVLTVLHQDWLNGKEYKCKVSNKALPAPIEKTISKA |
| | | KGQPREPQVCTLPPSREEMTKNQVSLSCAVKGFYPSDIAVEWESNG |
| | | QPENNYKTTPPVLDSDGSFFLVSKLTVDKSRWQQGNVFSCSVMHEA |
| | | LHNHYTQKSLSLSPGX, wherein X is K or absent |
| SEQ ID | TGFbR2- | IPPHVQKSVNNDMIVTDNNGAVKFPQLCKFCDVRFSTCDNQKSCMS |
| NO: | 3x4GS- | NCSITSICEKPQEVCVAVWRKNDENITLETVCHDPKLPYHDFILEDA |
| 6410 | hCH1- | ASPKCIMKEKKKPGETFFMCSCSSDECNDNIIFSEEYNTSNPDGGGGS |
| | hFc_Knob | GGGGSGGGGSASTKGPSVFPLAPSSKSTSGGTAALGCLVKDYFPEPV |
| | | TVSWNSGALTSGVHTFPAVLQSSGLYSLSSVVTVPSSSLGTQTYICN |
| | | VNHKPSNTKVDKRVEPKSCDKTHTCPPCPAPELLGGPSVFLFPPKPK |
| | | DTLMISRTPEVTCVVVDVSHEDPEVKFNWYVDGVEVHNAKTKPRE |
| | | EQYNSTYRVVSVLTVLHQDWLNGKEYKCKVSNKALPAPIEKTISKA |
| | | KGQPREPQVYTLPPCREEMTKNQVSLWCLVKGFYPSDIAVEWESNG |
| | | QPENNYKTTPPVLDSDGSFFLYSKLTVDKSRWQQGNVFSCSVMHEA |
| | | LHNHYTQKSLSLSPGX, wherein X is K or absent |
| SEQ ID | TGFbR2- | IPPHVQKSVNNDMIVTDNNGAVKFPQLCKFCDVRFSTCDNQKSCMS |
| NO: | 3x4GS- | NCSITSICEKPQEVCVAVWRKNDENITLETVCHDPKLPYHDFILEDA |
| 6411 | hCLIg_vl | ASPKCIMKEKKKPGETFFMCSCSSDECNDNIIFSEEYNTSNPDGGGGS |
| | | GGGGSGGGGSGQPKANPTVTLFPPSSEELQANKATLVCLISDFYPGA |
| | | VTVAWKADGSPVKAGVETTKPSKQSNNKYAASSYLSLTPEQWKSH |
| | | RSYSCQVTHEGSTVEKTVAPTECS |
| SEQ ID | TGFβR2- | IPPHVQKSVNNDMIVTDNNGAVKFPQLCKFCDVRFSTCDNQKSCMS |
| NO: | 3x4GS- | NCSITSICEKPQEVCVAVWRKNDENITLETVCHDPKLPYHDFILEDA |
| 6412 | hCLIg_vk | ASPKCIMKEKKKPGETFFMCSCSSDECNDNIIFSEEYNTSNPDGGGGS |
| | | GGGGSGGGGSRTVAAPSVFIFPPSDEQLKSGTASVVCLLNNFYPREA |
| | | KVQWKVDNALQSGNSQESVTEQDSKDSTYSLSSTLTLSKADYEKH |
| | | KVYACEVTHQGLSSPVTKSFNRGEC |

### Stromal Modifying Moieties

[0899] Solid tumors have a distinct structure that mimics that of normal tissues and comprises two distinct but interdependent compartments: the parenchyma (neoplastic cells) and the stroma that the neoplastic cells induce and in which they are dispersed. All tumors have stroma and require stroma for nutritional support and for the removal of waste products. In the case of tumors which grow as cell suspensions (e.g., leukemias, ascites tumors), the blood plasma serves as stroma (Connolly J L et al. Tumor Structure and Tumor Stroma Generation. In: Kufe D W et al., editors. Holland-Frei Cancer Medicine. 6th edition. Hamilton: BC Decker; 2003). The stroma includes a variety of cell types, including fibroblasts/myofibroblasts, glial, epithelial, fat, vascular, smooth muscle, and immune cells along with extracellular matrix (ECM) and extracellular molecules (Li Hanchen et al. Tumor Microenvironment: The Role of the Tumor Stroma in Cancer. J of Cellular Biochemistry 101: 805-815 (2007)).

[0900] Stromal modifying moieties described herein include moieties (e.g., proteins, e.g., enzymes) capable of degrading a component of the stroma, e.g., an ECM component, e.g., a glycosaminoglycan, e.g., hyaluronan (also known as hyaluronic acid or HA), chondroitin sulfate, chondroitin, dermatan sulfate, heparin sulfate, heparin, entactin, tenascin, aggrecan and keratin sulfate; or an extracellular protein, e.g., collagen, laminin, elastin, fibrinogen, fibronectin, and vitronectin.

### Stromal Modifying Enzymes

[0901] In some embodiments, the stromal modifying moiety is an enzyme. For example, the stromal modifying moiety can include, but is not limited to a hyaluronidase, a collagenase, a chondroitinase, a matrix metalloproteinase (e.g., macrophage metalloelastase).

[0902] Hyaluronidases

[0903] Hyaluronidases are a group of neutral- and acid-active enzymes found throughout the animal kingdom. Hyaluronidases vary with respect to substrate specificity, and mechanism of action. There are three general classes of hyaluronidases: (1) Mammalian-type hyaluronidases, (EC 3.2.1.35) which are endo-beta-N-acetylhexosaminidases with tetrasaccharides and hexasaccharides as the major end products. They have both hydrolytic and transglycosidase activities, and can degrade hyaluronan and chondroitin sulfates; (2) Bacterial hyaluronidases (EC 4.2.99.1) degrade hyaluronan and, and to various extents, chondroitin sulfate and dermatan sulfate. They are endo-beta-N-acetylhexosaminidases that operate by a beta elimination reaction that yields primarily disaccharide end products; (3) Hyaluronidases (EC 3.2.1.36) from leeches, other parasites, and crustaceans are endo-beta-glucuronidases that generate tetrasaccharide and hexasaccharide end products through hydrolysis of the beta 1-3 linkage.

[0904] Mammalian hyaluronidases can be further divided into two groups: (1) neutral active and (2) acid active enzymes. There are six hyaluronidase-like genes in the human genome, HYAL1, HYAL2, HYAL3 HYAL4 HYALP1 and PH20/SPAM1. HYALP1 is a pseudogene, and HYAL3 has not been shown to possess enzyme activity toward any known substrates. HYAL4 is a chondroitinase and lacks activity towards hyaluronan. HYAL1 is the prototypical acid-active enzyme and PH20 is the prototypical neutral-active enzyme. Acid active hyaluronidases, such as HYAL1 and HYAL2 lack catalytic activity at neutral pH. For example, HYAL1 has no catalytic activity in vitro over pH 4.5 (Frost and Stem, “A Microtiter-Based Assay for Hyaluronidase Activity Not Requiring Specialized Reagents”, Analytical Biochemistry, vol. 251, pp. 263-269 (1997). HYAL2 is an acid active enzyme with a very low specific activity in vitro.

[0905] In some embodiments the hyaluronidase is a mammalian hyaluronidase. In some embodiments the hyaluronidase is a recombinant human hyaluronidase. In some embodiments, the hyaluronidase is a neutral active hyaluronidase. In some embodiments, the hyaluronidase is a neutral active soluble hyaluronidase. In some embodiments, the hyaluronidase is a recombinant PH20 neutral-active enzyme. In some embodiments, the hyaluronidase is a recombinant PH20 neutral-active soluble enzyme. In some embodiments the hyaluronidase is glycosylated. In some embodiments, the hyaluronidase possesses at least one N-linked glycan. A recombinant hyaluronidase can be produced using conventional methods known to those of skill in the art, e.g., U.S. Pat. No. 7,767,429, the entire contents of which are incorporated by reference herein.

[0906] In some embodiments the hyaluronidase is rHuPH20 (also referred to as Hylenex®; presently manufactured by Halozyme; approved by the FDA in 2005 (see e.g., Scodeller P (2014) Hyaluronidase and other Extracellular Matrix Degrading Enzymes for Cancer Therapy: New Uses and Nano-Formulations. J Carcinog Mutage 5:178; U.S. Pat. Nos. 7,767,429; 8,202,517; 7,431,380; 8,450,470; 8,772,246; 8,580,252, the entire contents of each of which is incorporated by reference herein). rHuPH20 is produced by genetically engineered CHO cells containing a DNA plasmid encoding for a soluble fragment of human hyaluronidase PH20. In some embodiments the hyaluronidase is glycosylated. In some embodiments, the hyaluronidase possesses at least one N-linked glycan. A recombinant hyaluronidase can be produced using conventional methods known to those of skill in the art, e.g., U.S. Pat. No. 7,767,429, the entire contents of which are incorporated by reference herein. In some embodiments, rHuPH20 has a sequence at least 95% (e.g., at least 96° 98% 99%, 100%) identical to the amino acid sequence of

(SEQ ID NO: 6213)
LNFRAPPVIPNVPFLWAWNAPSEFCLGKFDEPLDMSLFSFIGSPRINAT
GQGVTIFYVDRLGYYPYIDSITGVTVNGGIPQKISLQDHLDKAKKDITF
YMPVDNLGMAVIDWEEWRPTWARNWKPKDVYKNRSIELVQQQNVQLSLT
EATEKAKQEFEKAGKDFLVETIKLGKLLRPNHLWGYYLFPDCYNHHYKK
PGYNGSCFNVEIKRNDDLSWLWNESTALYPSIYLNTQQSPVAATLYVRN
RVREAIRVSKIPDAKSPLPVFAYTRIVFTDQVLKFLSQDELVYTFGETV
ALGASGIVIWGTLSIMRSMKSCLLLDNYMETILNPYIINVTLAAKMCSQ
VLCQEQGVCIRKNWNSSDYLHLNPDNFAIQLEKGGKFTVRGKPTLEDLE
QFSEKFYCSCYSTLSCKEKADVKDTDAVDVCIADGVCIDAFLKPPMETE
EPQIFYNASPSTLS.

[0907] In any of the methods provided herein, the anti-hyaluronan agent can be an agent that degrades hyaluronan or can be an agent that inhibits the synthesis of hyaluronan. For example, the anti-hyaluronan agent can be a hyaluronan degrading enzyme. In another example, the anti-hyaluronan agent or is an agent that inhibits hyaluronan synthesis. For example, the anti-hyaluronan agent is an agent that inhibits hyaluronan synthesis such as a sense or antisense nucleic acid molecule against an HA synthase or is a small molecule drug. For example, an anti-hyaluronan agent is 4-methylumbelliferone (MU) or a derivative thereof, or leflunomide or a derivative thereof. Such derivatives include, for example, a derivative of 4-methylumbelliferone (MU) that is 6,7-dihydroxy-4-methyl coumarin or 5,7-dihydroxy-4-methyl coumarin.

[0908] In further examples of the methods provided herein, the hyaluronan degrading enzyme is a hyaluronidase. In some examples, the hyaluronan-degrading enzyme is a PH20 hyaluronidase or truncated form thereof to lacking a C-terminal glycosylphosphatidylinositol (GPI) attachment site or a portion of the GPI attachment site. In specific examples, the hyaluronidase is a PH20 selected from a human, monkey, bovine, ovine, rat, mouse or guinea pig PH20. For example, the hyaluronan-degrading enzyme is a human PH20 hyaluronidase that is neutral active and N-glycosylated and is selected from among (a) a hyaluronidase polypeptide that is a full-length PH20 or is a C-terminal truncated form of the PH20, wherein the truncated form includes at least amino acid residues 36-464 of SEQ ID NO: 6213, such as 36-481, 36-482, 36-483, where the full-length PH20 has the sequence of amino acids set forth in SEQ ID NO: 6213; or (b) a hyaluronidase polypeptide comprising a sequence of amino acids having at least 85%, 86%, 87%, 88%, 89%, 90%, 91%, 92%, 93%, 94%, 95%, 96%, 97%, 98%, 99% or more sequence identity with the polypeptide or truncated form of sequence of amino acids set forth in SEQ ID NO: 6213; or (c) a hyaluronidase polypeptide of (a) or (b) comprising amino acid substitutions, whereby the hyaluronidase polypeptide has a sequence of amino acids having at least 85%, 86%, 87%, 88%, 89%, 90%, 91%, 92%, 93%, 94%, 95%, 96%, 97%, 98%, 99% or more sequence identity with the polypeptide set forth in SEQ ID NO: 6213 or the with the corresponding truncated forms thereof. In exemplary examples, the hyaluronan-degrading enzyme is a PH20 that comprises a composition designated rHuPH20.

[0909] In other examples, the anti-hyaluronan agent is a hyaluronan degrading enzyme that is modified by conjugation to a polymer. The polymer can be a PEG and the anti-hyaluronan agent a PEGylated hyaluronan degrading enzyme. Hence, in some examples of the methods provided herein the hyaluronan-degrading enzyme is modified by conjugation to a polymer. For example, the hyaluronan-degrading enzyme is conjugated to a PEG, thus the hyaluronan degrading enzyme is PEGylated. In an exemplary example, the hyaluronan-degrading enzyme is a PEGylated PH20 enzyme (PEGPH20). In the methods provided herein, the corticosteroid can be a glucocorticoid that is selected from among cortisones, dexamethasones, hydrocortisones, methylprednisolones, prednisolones and prednisones.

[0910] Chondroitinases

[0911] Chondroitinases are enzymes found throughout the animal kingdom which degrade glycosaminoglycans, specifically chondroitins and chondroitin sulfates, through an endoglycosidase reaction. In some embodiments the chondroitinase is a mammalian chondroitinase. In some embodiments the chondroitinase is a recombinant human chondroitinase. In some embodiments the chondroitinase is HYAL4. Other exemplary chondroitinases include chondroitinase ABC (derived from Proteus vulgaris; Japanese Patent Application Laid-open No 6-153947, T. Yamagata et al. J. Biol. Chem., 243, 1523 (1968), S. Suzuki et al, J. Biol. Chem., 243, 1543 (1968)), chondroitinase AC (derived from Flavobacterium heparinum; T. Yamagata et al., J. Biol. Chem., 243, 1523 (1968)), chondroitinase AC II (derived from Arthrobacter aurescens; K. Hiyama, and S. Okada, J. Biol. Chem., 250, 1824 (1975), K. Hiyama and S. Okada, J. Biochem. (Tokyo), 80, 1201 (1976)), Hyaluronidase ACIII (derived from Flavobacterium sp. Hp102; Hirofumi Miyazono et al., Seikagaku, 61, 1023 (1989)), chondroitinase B (derived from Flavobacterium heparinum; Y. M. Michelacci and C. P. Dietrich, Biochem. Biophys. Res. Commun., 56, 973 (1974), Y. M. Michelacci and C. P. Dietrich, Biochem. J., 151, 121 (1975), Kenichi Maeyama et al, Seikagaku, 57, 1189 (1985)), chondroitinase C (derived from Flavobacterium sp. Hp102; Hirofumi Miyazono et al, Seikagaku, 61, 1023 (1939)), and the like.

[0912] Matrix Metalloproteinases

[0913] Matrix metalloproteases (MMPs) are zinc-dependent endopeptidases that are the major proteases involved in extracellular matrix (ECM) degradation. MMPs are capable of degrading a wide range of extracellular molecules and a number of bioactive molecules. Twenty-four MMP genes have been identified in humans, which can be organized into six groups based on domain organization and substrate preference: Collagenases (MMP-1, -8 and -13), Gelatinases (MMP-2 and MMP-9), Stromelysins (MMP-3, -10 and -11), Matrilysin (MMP-7 and MMP-26), Membrane-type (MT)-MMPs (MMP-14, -15, -16, -17, -24 and -25) and others (MMP-12, -19, -20, -21, -23, -27 and -28). In some embodiments, the stromal modifying moiety is a human recombinant MMP (e.g., MMP-1, -2, -3, -4, -5, -6, -7, -8, -9, 10, -11, -12, -13, -14, 15, -15, -17, -18, -19, 20, -21, -22, -23, or -24).

[0914] Collagenases

[0915] The three mammalian collagenases (MMP-1, -8, and -13) are the principal secreted endopeptidases capable of cleaving collagenous extracellular matrix. In addition to fibrillar collagens, collagenases can cleave several other matrix and non-matrix proteins including growth factors. Collagenases are synthesized as inactive pro-forms, and once activated, their activity is inhibited by specific tissue inhibitors of metalloproteinases, TIMPs, as well as by non-specific proteinase inhibitors (Ala-aho R et al. Biochimie. Collagenases in cancer. 2005 Mar-Apr; 87(3-4):273-86). In some embodiments, the stromal modifying moiety is a collagenase. In some embodiments, the collagenase is a human recombinant collagenase. In some embodiments, the collagenase is MMP-1. In some embodiments, the collagenase is MMP-8. In some embodiments, the collagenase is MMP-13.

[0916] Macrophage Metalloelastase

[0917] Macrophage metalloelastase (MME), also known as MMP-12, is a member of the stromelysin subgroup of MMPs and catalyzes the hydrolysis of soluble and insoluble elastin and a broad selection of matrix and nonmatrix substrates including type IV collagen, fibronectin, laminin, vitronectin, entactin, heparan, and chondroitin sulfates (Erja Kerkelä et al. Journal of Investigative Dermatology (2000) 114, 1113-1119; doi: 10.1046/j.1523-1747.2000.00993). In some embodiments, the stromal modifying moiety is a MME. In some embodiments, the MME is a human recombinant MME. In some embodiments, the MME is MMP-12.

### Additional Stromal Modifying Moieties

[0918] In some embodiments, the stromal modifying moiety causes one or more of: decreases the level or production of a stromal or extracellular matrix (ECM) component; decreases tumor fibrosis; increases interstitial tumor transport; improves tumor perfusion; expands the tumor microvasculature; decreases interstitial fluid pressure (IFP) in a tumor; or decreases or enhances penetration or diffusion of an agent, e.g., a cancer therapeutic or a cellular therapy, into a tumor or tumor vasculature.

[0919] In some embodiments, the stromal or ECM component decreased is chosen from a glycosaminoglycan or an extracellular protein, or a combination thereof. In some embodiments, the glycosaminoglycan is chosen from hyaluronan (also known as hyaluronic acid or HA), chondroitin sulfate, chondroitin, dermatan sulfate, heparin, heparin sulfate, entactin, tenascin, aggrecan and keratin sulfate. In some embodiments, the extracellular protein is chosen from collagen, laminin, elastin, fibrinogen, fibronectin, or vitronectin. In some embodiments, the stromal modifying moiety includes an enzyme molecule that degrades a tumor stroma or extracellular matrix (ECM). In some embodiments, the enzyme molecule is chosen from a hyaluronidase molecule, a collagenase molecule, a chondroitinase molecule, a matrix metalloproteinase molecule (e.g., macrophage metalloelastase), or a variant (e.g., a fragment) of any of the aforesaid. The term “enzyme molecule” includes a full length, a fragment or a variant of the enzyme, e.g., an enzyme variant that retains at least one functional property of the naturally-occurring enzyme.

[0920] In some embodiments, the stromal modifying moiety decreases the level or production of hyaluronic acid. In other embodiments, the stromal modifying moiety comprises a hyaluronan degrading enzyme, an agent that inhibits hyaluronan synthesis, or an antibody molecule against hyaluronic acid.

[0921] In some embodiments, the hyaluronan degrading enzyme is a hyaluronidase molecule, e.g., a full length or a variant (e.g., fragment thereof) thereof. In some embodiments, the hyaluronan degrading enzyme is active in neutral or acidic pH, e.g., pH of about 4-5. In some embodiments, the hyaluronidase molecule is a mammalian hyaluronidase molecule, e.g., a recombinant human hyaluronidase molecule, e.g., a full length or a variant (e.g., fragment thereof, e.g., a truncated form) thereof. In some embodiments, the hyaluronidase molecule is chosen from HYAL1, HYAL2, or PH-20/SPAM1, or a variant thereof (e.g., a truncated form thereof). In some embodiments, the truncated form lacks a C-terminal glycosylphosphatidylinositol (GPI) attachment site or a portion of the GPI attachment site. In some embodiments, the hyaluronidase molecule is glycosylated, e.g., comprises at least one N-linked glycan.

[0922] In some embodiments, the hyaluronidase molecule comprises the amino acid sequence:

(SEQ ID NO: 6213)
LNFRAPPVIPNVPFLWAWNAPSEFCLGKFDEPLDMSLFSFIGSPRINAT
GQGVTIFYVDRLGYYPYIDSITGVTVNGGIPQKISLQDHLDKAKKDITF
YMPVDNLGMAVIDWEEWRPTWARNWKPKDVYKNRSIELVQQQNVQLSLT
EATEKAKQEFEKAGKDFLVETIKLGKLLRPNHLWGYYLFPDCYNHHYKK
PGYNGSCFNVEIKRNDDLSWLWNESTALYPSIYLNTQQSPVAATLYVRN
RVREAIRVSKIPDAKSPLPVFAYTRIVFTDQVLKFLSQDELVYTFGETV
ALGASGIVIWGTLSIMRSMKSCLLLDNYMETILNPYIINVTLAAKMCSQ
VLCQEQGVCIRKNWNSSDYLHLNPDNFAIQLEKGGKFTVRGKPTLEDLE
QFSEKFYCSCYSTLSCKEKADVKDTDAVDVCIADGVCIDAFLKPPMETE
EPQIFYNASPSTLS,

or a fragment thereof, or an amino acid sequence substantially identical thereto (e.g., 95% to 99.9% identical thereto, or having at least one amino acid alteration, but not more than five, ten or fifteen alterations (e.g., substitutions, deletions, or insertions, e.g., conservative substitutions) to the amino acid sequence of SEQ ID NO: 6213.

[0923] In some embodiments, the hyaluronidase molecule comprises:
[0924] (i) the amino acid sequence of 36-464 of SEQ ID NO: 6213;
[0925] (ii) the amino acid sequence of 36481, 36482, or 36-483 of PH20, wherein PH20 has the sequence of amino acids set forth in SEQ ID NO: 6213; or
[0926] (iii) an amino acid sequence having at least 95% to 100% sequence identity to the polypeptide or truncated form of sequence of amino acids set forth in SEQ ID NO: 6213; or
[0927] (iv) an amino acid sequence having 30, 20, 10, 5 or fewer amino acid substitutions to the amino acid sequence set forth in SEQ ID NO: 6213. In some embodiments, the hyaluronidase molecule comprises an amino acid sequence at least 95% (e.g., at least 95%, 96%, 97%, 98%, 99%, 100%) identical to the amino acid sequence of SEQ ID NO: 6213. In some embodiments, the hyaluronidase molecule is encoded by a nucleotide sequence at least 95% (e.g., at least 96%, 97%, 98%, 99%, 100%) identical to the nucleotide sequence of SEQ ID NO: 6213.

[0928] In some embodiments, the hyaluronidase molecule is PH20, e.g., rHuPH20. In some embodiments, the hyaluronidase molecule is HYAL1 and comprises the amino acid sequence:

(SEQ ID NO: 6218)
FRGPLLPNRPFTTVWNANTQWCLERHGVDVDVSVFDVVANPGQTFRGPD
MTIFYSSQGTYPYYTPTGEPVFGGLPQNASLIAHLARTFQDILAAIPAP
RSRALVQAQHPDWPAPQVEAVAQDQFQGAARAWMAGTLQLGRALRPRGL
WDFSGLAVIDWEAWRPRWAFNWDTKDIYRQGFYGFPDCYNYDFLSPNYT
GQCPSGIRAQNDQLGWLWGQSRALYPSIYMPAVLEGTGKSQMYVQHRVA
EAFRVAVAAGDPNLPVLPYVQIFYDTTNHFLPLDELEHSLGESAAQGAA
GVVLWVSWENTRTKESCQAIKEYMDTTLGPFILNVTSGALLCSQALCSG
HGRCVRRTSHPKALLLLNPASFSIQLTPGGGPLSLRGALSLEDQAQMAV
EFKCRCYPGWQAPWCERKSMW,

or a fragment thereof, or an amino acid sequence substantially identical thereto (e.g., 95% to 99.9% identical thereto, or having at least one amino acid alteration, but not more than five, ten or fifteen alterations (e.g., substitutions, deletions, or insertions, e.g., conservative substitutions) to the amino acid sequence of SEQ ID NO: 6218.

[0929] In some embodiments, the hyaluronan degrading enzyme, e.g., the hyaluronidase molecule, further comprises a polymer, e.g., is conjugated to a polymer, e.g., PEG. In some embodiments, the hyaluronan-degrading enzyme is a PEGylated PH20 enzyme (PEGPH20). In some embodiments, the hyaluronan degrading enzyme, e.g., the hyaluronidase molecule, further comprises an immunoglobulin chain constant region (e.g., Fc region) chosen from, e.g., the heavy chain constant regions of IgG1, IgG2, IgG3, and IgG4, more particularly, the heavy chain constant region of human IgG1, IgG2, IgG3, or IgG4. In some embodiments, the immunoglobulin constant region (e.g., the Fc region) is linked, e.g., covalently linked to, the hyaluronan degrading enzyme, e.g., the hyaluronidase molecule. In some embodiments, the immunoglobulin chain constant region (e.g., Fc region) is altered, e.g., mutated, to increase or decrease one or more of: Fe receptor binding, antibody glycosylation, the number of cysteine residues, effector cell function, or complement function. In some embodiments, the hyaluronan degrading enzyme, e.g., the hyaluronidase molecule forms a dimer.

[0930] In some embodiments, the stromal modifying moiety comprises an inhibitor of the synthesis of hyaluronan, e.g., an HA synthase. In some embodiments, the inhibitor comprises a sense or an antisense nucleic acid molecule against an HA synthase or is a small molecule drug. In some embodiments, the inhibitor is 4-methylumbelliferone (MU) or a derivative thereof (e.g., 6,7-dihydroxy-4-methyl coumarin or 5,7-dihydroxy-4-methyl coumarin), or leflunomide or a derivative thereof.

[0931] In some embodiments, the stromal modifying moiety comprises antibody molecule against hyaluronic acid.

[0932] In some embodiments, the stromal modifying moiety comprises a collagenase molecule, e.g., a mammalian collagenase molecule, or a variant (e.g., fragment) thereof. In some embodiments, the collagenase molecule is collagenase molecule IV, e.g., comprising the amino acid sequence of:

(SEQ ID NO: 6219)
YNFFPRKPKWDKNQITYRIIGYTPDLDPETVDDAFARAFQVWSDVTPLR
FSRIHDGEADIMINFGRWEHGDGYPFDGKDGLLAHAFAPGTGVGGDSHF
DDDELWTLGEGQVVRVKYGNADGEYCKFPFLFNGKEYNSCTDTGRSDGF
LWCSTTYNFEKDGKYGFCPHEALFTMGGNAEGQPCKFPFRFQGTSYDSC
TTEGRTDGYRWCGTTEDYDRDKKYGFCPETAMSTVGGNSEGAPCVFPFT
FLGNKYESCTSAGRSDGKMWCATTANYDDDRKWGFCPDQGYSLFLVAAH
EFGHAMGLEHSQDPGALMAPIYTYTKNFRLSQDDIKGIQELYGASPDID
LGTGPTPTLGPVTPEICKQDIVFDGIAQIRGEIFFFKDRFIWRTVTPRD
KPMGPLLVATFWPELPEKIDAVYEAPQEEKAVFFAGNEYWIYSASTLER
GYPKPLTSLGLPPDVQRVDAAFNWSKNKKTYIFAGDKFWRYNEVKKKMD
PGFPKLIADAWNAIPDNLDAVVDLQGGGHSYFFKGAYYLKLENQSLKSV
KFGSIKSDWLGC,

or a fragment thereof, or an amino acid sequence substantially identical thereto (e.g., 95% to 99.9% identical thereto, or having at least one amino acid alteration, but not more than five, ten or fifteen alterations (e.g., substitutions, deletions, or insertions, e.g., conservative substitutions) to the amino acid sequence of SEQ ID NO: 6219.

### Targeting Moieties

[0933] In some embodiments, the multispecific and/or multifunctional molecules disclosed herein comprise a tumor-targeting moiety. In some embodiments, the tumor-targeting moiety targets (e.g., binds to) a tumor antigen selected from: G6B, CD34, CD41, P-selectin, Clec2, cKIT, FLT3, MPL, ITGB3, ITGB2, GP5, GP6, GP9, GP1BA, DSC2, FCGR2A, TNFRSF10A, TNFRSF10B, or TM4SF1. In some embodiments, the tumor-targeting moiety targets (e.g., binds to) G6B.

[0934] G6B refers to MPIG6B, also known as megakaryocyte and platelet inhibitory receptor G6b or C6orf25. Swiss-Prot accession number 095866 provides exemplary human G6B amino acid sequences. In some embodiments, G6B or G6B molecule is a naturally-existing G6B or a functional variant or fragment thereof.

[0935] CD34 refers to hematopoietic progenitor cell antigen CD34. Swiss-Prot accession number P28906 provides exemplary human CD34 amino acid sequences. In some embodiments, CD34 or CD34 molecule is a naturally-existing CD34 or a functional variant or fragment thereof.

[0936] CD41 refers to ITGA2B, also known as Integrin alpha-IIb. Swiss-Prot accession number P08514 provides exemplary human CD41 amino acid sequences. In some embodiments, CD41 or CD41 molecule is a naturally-existing CD41 or a functional variant or fragment thereof.

[0937] P-selectin refers to SELP, also known as CD62P, GMP-140 or LECAM3. Swiss-Prot accession number P16109 provides exemplary human P-selectin amino acid sequences. In some embodiments, P-selectin or P-selectin molecule is a naturally-existing P-selectin or a functional variant or fragment thereof.

[0938] Clec2 refers to CLECIB, also known as C-type lectin domain family 1 member B. Swiss-Prot accession number Q9P126 provides exemplary human Clec2 amino acid sequences. In some embodiments, Clec2 or Clec2 molecule is a naturally-existing Clec2 or a functional variant or fragment thereof.

[0939] cKIT refers to mast/stem cell growth factor receptor kit, also known as CD117. Swiss-Prot accession number P10721 provides exemplary human cKIT amino acid sequences. In some embodiments, cKIT or cKIT molecule is a naturally-existing cKIT or a functional variant or fragment thereof.

[0940] FLT3 refers to receptor-type tyrosine-protein kinase FLT3, also known as CD135. Swiss-Prot accession number P36888 provides exemplary human FLT3 amino acid sequences. In some embodiments, FLT3 or FLT3 molecule is a naturally-existing FLT3 or a functional variant or fragment thereof.

[0941] MPL refers to thrombopoietin receptor, also known as C7403. Swiss-Prot accession number P40238 provides exemplary human MPL amino acid sequences. In some embodiments, MPL or MPL molecule is a naturally-existing MPL or a functional variant or fragment thereof.

[0942] ITGB3 refers to Integrin beta-3, also known as CD61. Swiss-Prot accession number P05106 provides exemplary human ITGB3 amino acid sequences. In some embodiments, ITGB3 or ITGB3 molecule is a naturally-existing ITGB3 or a functional variant or fragment thereof.

[0943] ITGB2 refers to Integrin beta-2, also known as CD18. Swiss-Prot accession number P05107 provides exemplary human ITGB2 amino acid sequences. In some embodiments, ITGB2 or ITGB2 molecule is a naturally-existing ITGB2 or a functional variant or fragment thereof.

[0944] GP5 refers to platelet glycoprotein V, also known as CD42d. Swiss-Prot accession number P40197 provides exemplary human GP5 amino acid sequences. In some embodiments, GP5 or GP5 molecule is a naturally-existing GP5 or a functional variant or fragment thereof.

[0945] GP6 refers to platelet glycoprotein VI. Swiss-Prot accession number Q9HCN6 provides exemplary human GP6 amino acid sequences. In some embodiments, GP6 or GP6 molecule is a naturally-existing GP6 or a functional variant or fragment thereof.

[0946] GP9 refers to platelet glycoprotein IX, also known as CD42a. Swiss-Prot accession number P14770 provides exemplary human GP9 amino acid sequences. In some embodiments, GP9 or GP9 molecule is a naturally-existing GP9 or a functional variant or fragment thereof.

[0947] GP1BA refers to platelet glycoprotein Ib alpha chain, also known as CD42b. Swiss-Prot accession number P07359 provides exemplary human GP1BA amino acid sequences. In some embodiments, GP1BA or GP1BA molecule is a naturally-existing GP1BA or a functional variant or fragment thereof.

[0948] DSC2 refers to desmocollin-2, also known as cadherin family member 2. Swiss-Prot accession number Q02487 provides exemplary human DSC2 amino acid sequences. In some embodiments, DSC2 or DSC2 molecule is a naturally-existing DSC2 or a functional variant or fragment thereof.

[0949] FCGR2A refers to Fc-gamma-RIIa, also known as CD32. Swiss-Prot accession number P12318 provides exemplary human FCGR2A amino acid sequences. In some embodiments, FCGR2A or FCGR2A molecule is a naturally-existing FCGR2A or a functional variant or fragment thereof.

[0950] TNFRSF10A refers to Tumor necrosis factor receptor superfamily member 10A, also known as Death receptor 4, TNF-related apoptosis-inducing ligand receptor 1, TRAIL-R1, or CD261. Swiss-Prot accession number 000220 provides exemplary human TNFRSF10A amino acid sequences. In some embodiments, TNFRSF10A or TNFRSF10A molecule is a naturally-existing TNFRSF10A or a functional variant or fragment thereof.

[0951] TNFRSF10B refers to Tumor necrosis factor receptor superfamily member 10B, also known as Death receptor 5, TNF-related apoptosis-inducing ligand receptor 2, TRAIL-R2, or CD262. Swiss-Prot accession number 014763 provides exemplary human TNFRSF10B amino acid sequences. In some embodiments, TNFRSF10B or TNFRSF10B molecule is a naturally-existing TNFRSF10B or a functional variant or fragment thereof.

[0952] TM4SF1 refers to transmembrane 4 L6 family member 1. Swiss-Prot accession number P30408 provides exemplary human TM4SF1 amino acid sequences. In some embodiments, TM4SF1 or TM4SF1 molecule is a naturally-existing TM4SF1 or a functional variant or fragment thereof.

[0953] In some embodiments, the multispecific and/or multifunctional molecule comprises one or more additional tumor-targeting moieties. In some embodiments, the one or more additional tumor-targeting moieties target (e.g., bind to) the same tumor antigen as the first tumor-targeting moiety. In some embodiments, the one or more additional tumor-targeting moieties target (e.g., bind to) a different tumor antigen from the first tumor-targeting moiety. In some embodiments, the multispecific and/or multifunctional molecule comprises a plurality of tumor-targeting moieties targeting different tumor antigens present on the same cell (e.g., a tumor cell). In some embodiments, the multispecific and/or multifunctional molecule comprises a plurality of tumor-targeting moieties targeting different tumor antigens present on different cells (e.g., 2, 3, 4, 5, 6, 7, 8, 9, 10, or more different tumor cells). In some embodiments, each of the tumor antigens is selected from: G6B, CD34, CD41, P-selectin, Clec2, cKIT, FLT3, MPL, ITGB3, ITGB2, GP5, GP6, GP9, GP1BA, DSC2, FCGR2A, TNFRSF10A, TNFRSF10B, or TM4SF1.

[0954] In some embodiments, the multispecific and/or multifunctional molecule comprises a first tumor-targeting moiety (e.g., targeting a first tumor antigen) and a second tumor-targeting moiety (e.g., targeting a second tumor antigen). In some embodiments, the first and second tumor antigens are present on the same tumor cell. In some embodiments, the first and third tumor antigens are present on the same tumor cell. In some embodiments, the second and third tumor antigens are present on the same tumor cell. In some embodiments, the first, second, and third tumor antigens are present on the same tumor cell. In some embodiments, the first and second tumor antigens are present on different tumor cells. In some embodiments, the first and third tumor antigens are present on different tumor cells. In some embodiments, the second and third tumor antigens are present on different tumor cells. In some embodiments, the first, second, and third tumor antigens are present on different tumor cells.

[0955] In some embodiments, the first, second, and/or third tumor antigens show higher expression in a tumor cell, e.g., a myeloproliferative neoplasm cell, than a non-tumor cell. In some embodiments, the expression of the first, second, and/or third tumor antigens in a tumor cell, e.g., a myeloproliferative neoplasm cell, is at least 1.5, 2, 4, 6, 8, or 10-fold higher than the expression of the first, second, and/or third tumor antigens in a non-tumor cell. In some embodiments, the multifunctional molecule preferentially binds to a tumor cell, e.g., a myeloproliferative neoplasm cell, over a non-tumor cell. In some embodiments, the binding between the multifunctional molecule and the tumor cell, e.g., a myeloproliferative neoplasm cell, is more than 10, 20, 30, 40, 50-fold greater than the binding between the multifunctional molecule and a non-tumor cell. In some embodiments, the affinity, e.g., the combined affinity, of the first and second tumor-targeting moieties for a tumor cell, e.g., a myeloproliferative neoplasm cell, is greater than the affinity of a similar multifunctional molecule having only one of the first tumor-targeting moiety or the second tumor-targeting moiety. In some embodiments, the affinity, e.g., the combined affinity, of the first and second tumor-targeting moieties for a tumor cell, e.g., a myeloproliferative neoplasm cell, is at least 2, 5, 10, 20, 30, 40, 50, 75 or 100 times greater than the affinity of a similar multifunctional molecule having only one of the first tumor-targeting moiety or the second tumor-targeting moiety.

[0956] In some embodiments, the affinity, e.g., the combined affinity, of the first, second, and third tumor-targeting moieties for a tumor cell, e.g., a myeloproliferative neoplasm cell, is greater than the affinity of a similar multifunctional molecule having only one of the first tumor-targeting moiety, the second tumor-targeting moiety, or the third tumor-targeting moiety, or a similar multifunctional molecule having only two of the first tumor-targeting moiety, the second tumor-targeting moiety, or the third tumor-targeting moiety. In some embodiments, the affinity, e.g., the combined affinity, of the first, second, and third tumor-targeting moieties for a tumor cell, e.g., a myeloproliferative neoplasm cell, is at least 2, 5, 10, 20, 30, 40, 50, 75 or 100 times greater than the affinity of a similar multifunctional molecule having only one of the first tumor-targeting moiety, the second tumor-targeting moiety, or the third tumor-targeting moiety, or a similar multifunctional molecule having only two of the first tumor-targeting moiety, the second tumor-targeting moiety, or the third tumor-targeting moiety.

[0957] In some embodiments, the affinity, e.g., the combined affinity, for the first and second tumor antigens of the first tumor-targeting moiety and the second tumor-targeting moiety is equal to or greater than the affinity of (iii), (iv) or (v), either alone or as part of the multifunctional molecule, for its corresponding binding member. In some embodiments, the affinity, e.g., the combined affinity, for the first and second tumor antigens of the first tumor-targeting moiety and the second tumor-targeting moiety is at least 2, 5, 10, 20, 30, 40, 50, 75 or 100 times greater than the affinity of (iii), (iv) or (v), either alone or as part of the multifunctional molecule, for its corresponding binding member.

[0958] In some embodiments, the affinity, e.g., the combined affinity, for the first, second, and third tumor antigens of the first tumor-targeting moiety, the second tumor-targeting moiety, and the third tumor-targeting moiety is equal to or greater than the affinity of (iii), (iv) or (v), either alone or as part of the multifunctional molecule, for its corresponding binding member. In some embodiments, the affinity, e.g., the combined affinity, for the first, second, and third tumor antigens of the first tumor-targeting moiety, the second tumor-targeting moiety, and the third tumor-targeting moiety is at least 2, 5, 10, 20, 30, 40, 50, 75 or 100 times greater than the affinity of (iii), (iv) or (v), either alone or as part of the multifunctional molecule, for its corresponding binding member.

[0959] In some embodiments of the aforementioned aspects, the first tumor antigen is CD34 and the second tumor antigen is CD41. In some embodiments, the first tumor antigen is CD34 and the second tumor antigen is G6B. In some embodiments, the first tumor antigen is CD41 and the second tumor antigen is G6B. In some embodiments, the first tumor antigen is CD34, the second tumor antigen is CD41, and the third tumor antigen is G6B.

[0960] In some embodiments of the aforementioned aspects, the first tumor antigen is P-selectin and the second tumor antigen is Clec2. In some embodiments, the first tumor antigen is CD34 and the second tumor antigen is P-selectin. In some embodiments, the first tumor antigen is CD41 and the second tumor antigen is P-selectin. In some embodiments, the first tumor antigen is G6B and the second tumor antigen is P-selectin. In some embodiments, the first tumor antigen is CD34 and the second tumor antigen is Clec2. In some embodiments, the first tumor antigen is CD41 and the second tumor antigen is Clec2. In some embodiments, the first tumor antigen is G6B and the second tumor antigen is Clec2. In some embodiments, the first tumor antigen is CD34, the second tumor antigen is CD41, and the third tumor antigen is P-selectin. In some embodiments, the first tumor antigen is CD34, the second tumor antigen is G6B, and the third tumor antigen is P-selectin. In some embodiments, the first tumor antigen is CD41, the second tumor antigen is G6B, and the third tumor antigen is P-selectin. In some embodiments, the first tumor antigen is CD34, the second tumor antigen is CD41, and the third tumor antigen is Clec2. In some embodiments, the first tumor antigen is CD34, the second tumor antigen is G6B, and the third tumor antigen is Clec2. In some embodiments, the first tumor antigen is CD41, the second tumor antigen is G6B, and the third tumor antigen is Clec2. In some embodiments, the first tumor antigen is CD34, the second tumor antigen is P-selectin, and the third tumor antigen is Clec2. In some embodiments, the first tumor antigen is CD41, the second tumor antigen is P-selectin, and the third tumor antigen is Clec2. In some embodiments, the first tumor antigen is G6B, the second tumor antigen is P-selectin, and the third tumor antigen is Clec2.

[0961] In some embodiments of the aforementioned aspects, the first tumor antigen is CD34 and the second tumor antigen is CD34. In some embodiments, the first tumor antigen is CD34 and the second tumor antigen is CD41. In some embodiments, the first tumor antigen is CD34 and the second tumor antigen is G6B. In some embodiments, the first tumor antigen is CD34 and the second tumor antigen is P-selectin. In some embodiments, the first tumor antigen is CD34 and the second tumor antigen is Clec2. In some embodiments, the first tumor antigen is CD34 and the second tumor antigen is cKIT. In some embodiments, the first tumor antigen is CD34 and the second tumor antigen is FLT3. In some embodiments, the first tumor antigen is CD34 and the second tumor antigen is MPL. In some embodiments, the first tumor antigen is CD34 and the second tumor antigen is ITGB3. In some embodiments, the first tumor antigen is CD34 and the second tumor antigen is ITGB2. In some embodiments, the first tumor antigen is CD34 and the second tumor antigen is GP5. In some embodiments, the first tumor antigen is CD34 and the second tumor antigen is GP6. In some embodiments, the first tumor antigen is CD34 and the second tumor antigen is GP9. In some embodiments, the first tumor antigen is CD34 and the second tumor antigen is GP1BA. In some embodiments, the first tumor antigen is CD34 and the second tumor antigen is DSC2. In some embodiments, the first tumor antigen is CD34 and the second tumor antigen is FCGR2A. In some embodiments, the first tumor antigen is CD34 and the second tumor antigen is TNFRSF10A. In some embodiments, the first tumor antigen is CD34 and the second tumor antigen is TNFRSF10B. In some embodiments, the first tumor antigen is CD34 and the second tumor antigen is TM4SF1.

[0962] In some embodiments of the aforementioned aspects, the first tumor antigen is CD41 and the second tumor antigen is CD34. In some embodiments, the first tumor antigen is CD41 and the second tumor antigen is CD41. In some embodiments, the first tumor antigen is CD41 and the second tumor antigen is G6B. In some embodiments, the first tumor antigen is CD41 and the second tumor antigen is P-selectin. In some embodiments, the first tumor antigen is CD41 and the second tumor antigen is Clec2. In some embodiments, the first tumor antigen is CD41 and the second tumor antigen is cKIT. In some embodiments, the first tumor antigen is CD41 and the second tumor antigen is FLT3. In some embodiments, the first tumor antigen is CD41 and the second tumor antigen is MPL. In some embodiments, the first tumor antigen is CD41 and the second tumor antigen is ITGB3. In some embodiments, the first tumor antigen is CD41 and the second tumor antigen is ITGB2. In some embodiments, the first tumor antigen is CD41 and the second tumor antigen is GP5. In some embodiments, the first tumor antigen is CD41 and the second tumor antigen is GP6. In some embodiments, the first tumor antigen is CD41 and the second tumor antigen is GP9. In some embodiments, the first tumor antigen is CD41 and the second tumor antigen is GP1BA. In some embodiments, the first tumor antigen is CD41 and the second tumor antigen is DSC2. In some embodiments, the first tumor antigen is CD41 and the second tumor antigen is FCGR2A. In some embodiments, the first tumor antigen is CD41 and the second tumor antigen is TNFRSF10A. In some embodiments, the first tumor antigen is CD41 and the second tumor antigen is TNFRSF10B. In some embodiments, the first tumor antigen is CD41 and the second tumor antigen is TM4SF1.

[0963] In some embodiments of the aforementioned aspects, the first tumor antigen is G6B and the second tumor antigen is CD34. In some embodiments, the first tumor antigen is G6B and the second tumor antigen is CD41. In some embodiments, the first tumor antigen is G6B and the second tumor antigen is G6B. In some embodiments, the first tumor antigen is G6B and the second tumor antigen is P-selectin. In some embodiments, the first tumor antigen is G6B and the second tumor antigen is Clec2. In some embodiments, the first tumor antigen is G6B and the second tumor antigen is cKIT. In some embodiments, the first tumor antigen is G6B and the second tumor antigen is FLT3. In some embodiments, the first tumor antigen is G6B and the second tumor antigen is MPL. In some embodiments, the first tumor antigen is G6B and the second tumor antigen is ITGB3. In some embodiments, the first tumor antigen is G6B and the second tumor antigen is ITGB2. In some embodiments, the first tumor antigen is G6B and the second tumor antigen is GP5. In some embodiments, the first tumor antigen is G6B and the second tumor antigen is GP6. In some embodiments, the first tumor antigen is G6B and the second tumor antigen is GP9. In some embodiments, the first tumor antigen is G6B and the second tumor antigen is GP1BA. In some embodiments, the first tumor antigen is G6B and the second tumor antigen is DSC2. In some embodiments, the first tumor antigen is G6B and the second tumor antigen is FCGR2A. In some embodiments, the first tumor antigen is G6B and the second tumor antigen is TNFRSF10A. In some embodiments, the first tumor antigen is G6B and the second tumor antigen is TNFRSF10B. In some embodiments, the first tumor antigen is G6B and the second tumor antigen is TM4SF1.

[0964] In some embodiments of the aforementioned aspects, the first tumor antigen is P-selectin and the second tumor antigen is CD34. In some embodiments, the first tumor antigen is P-selectin and the second tumor antigen is CD41. In some embodiments, the first tumor antigen is P-selectin and the second tumor antigen is G6B. In some embodiments, the first tumor antigen is P-selectin and the second tumor antigen is P-selectin. In some embodiments, the first tumor antigen is P-selectin and the second tumor antigen is Clec2. In some embodiments, the first tumor antigen is P-selectin and the second tumor antigen is cKIT. In some embodiments, the first tumor antigen is P-selectin and the second tumor antigen is FLT3. In some embodiments, the first tumor antigen is P-selectin and the second tumor antigen is MPL. In some embodiments, the first tumor antigen is P-selectin and the second tumor antigen is ITGB3. In some embodiments, the first tumor antigen is P-selectin and the second tumor antigen is ITGB2. In some embodiments, the first tumor antigen is P-selectin and the second tumor antigen is GP5. In some embodiments, the first tumor antigen is P-selectin and the second tumor antigen is GP6. In some embodiments, the first tumor antigen is P-selectin and the second tumor antigen is GP9. In some embodiments, the first tumor antigen is P-selectin and the second tumor antigen is GP1BA. In some embodiments, the first tumor antigen is P-selectin and the second tumor antigen is DSC2. In some embodiments, the first tumor antigen is P-selectin and the second tumor antigen is FCGR2A. In some embodiments, the first tumor antigen is P-selectin and the second tumor antigen is TNFRSF10A. In some embodiments, the first tumor antigen is P-selectin and the second tumor antigen is TNFRSF10B. In some embodiments, the first tumor antigen is P-selectin and the second tumor antigen is TM4SF1.

[0965] In some embodiments of the aforementioned aspects, the first tumor antigen is Clec2 and the second tumor antigen is CD34. In some embodiments, the first tumor antigen is Clec2 and the second tumor antigen is CD41. In some embodiments, the first tumor antigen is Clec2 and the second tumor antigen is G6B. In some embodiments, the first tumor antigen is Clec2 and the second tumor antigen is P-selectin. In some embodiments, the first tumor antigen is Clec2 and the second tumor antigen is Clec2. In some embodiments, the first tumor antigen is Clec2 and the second tumor antigen is cKIT. In some embodiments, the first tumor antigen is Clec2 and the second tumor antigen is FLT3. In some embodiments, the first tumor antigen is Clec2 and the second tumor antigen is MPL. In some embodiments, the first tumor antigen is Clec2 and the second tumor antigen is ITGB3. In some embodiments, the first tumor antigen is Clec2 and the second tumor antigen is ITGB2. In some embodiments, the first tumor antigen is Clec2 and the second tumor antigen is GP5. In some embodiments, the first tumor antigen is Clec2 and the second tumor antigen is GP6. In some embodiments, the first tumor antigen is Clec2 and the second tumor antigen is GP9. In some embodiments, the first tumor antigen is Clec2 and the second tumor antigen is GP1BA. In some embodiments, the first tumor antigen is Clec2 and the second tumor antigen is DSC2. In some embodiments, the first tumor antigen is Clec2 and the second tumor antigen is FCGR2A. In some embodiments, the first tumor antigen is Clec2 and the second tumor antigen is TNFRSF10A. In some embodiments, the first tumor antigen is Clec2 and the second tumor antigen is TNFRSF10B. In some embodiments, the first tumor antigen is Clec2 and the second tumor antigen is TM4SF1.

[0966] In some embodiments of the aforementioned aspects, the first tumor antigen is cKIT and the second tumor antigen is CD34. In some embodiments, the first tumor antigen is cKIT and the second tumor antigen is CD41. In some embodiments, the first tumor antigen is cKIT and the second tumor antigen is G6B. In some embodiments, the first tumor antigen is cKIT and the second tumor antigen is P-selectin. In some embodiments, the first tumor antigen is cKIT and the second tumor antigen is Clec2. In some embodiments, the first tumor antigen is cKIT and the second tumor antigen is cKIT. In some embodiments, the first tumor antigen is cKIT and the second tumor antigen is FLT3. In some embodiments, the first tumor antigen is cKIT and the second tumor antigen is MPL. In some embodiments, the first tumor antigen is cKIT and the second tumor antigen is ITGB3. In some embodiments, the first tumor antigen is cKIT and the second tumor antigen is ITGB2. In some embodiments, the first tumor antigen is cKIT and the second tumor antigen is GP5. In some embodiments, the first tumor antigen is cKIT and the second tumor antigen is GP6. In some embodiments, the first tumor antigen is cKIT and the second tumor antigen is GP9. In some embodiments, the first tumor antigen is cKIT and the second tumor antigen is GP1BA. In some embodiments, the first tumor antigen is cKIT and the second tumor antigen is DSC2. In some embodiments, the first tumor antigen is cKIT and the second tumor antigen is FCGR2A. In some embodiments, the first tumor antigen is cKIT and the second tumor antigen is TNFRSF10A. In some embodiments, the first tumor antigen is cKIT and the second tumor antigen is TNFRSF10B. In some embodiments, the first tumor antigen is cKIT and the second tumor antigen is TM4SF1.

[0967] In some embodiments of the aforementioned aspects, the first tumor antigen is FLT3 and the second tumor antigen is CD34. In some embodiments, the first tumor antigen is FLT3 and the second tumor antigen is CD41. In some embodiments, the first tumor antigen is FLT3 and the second tumor antigen is G6B. In some embodiments, the first tumor antigen is FLT3 and the second tumor antigen is P-selectin. In some embodiments, the first tumor antigen is FLT3 and the second tumor antigen is Clec2. In some embodiments, the first tumor antigen is FLT3 and the second tumor antigen is cKIT. In some embodiments, the first tumor antigen is FLT3 and the second tumor antigen is FLT3. In some embodiments, the first tumor antigen is FLT3 and the second tumor antigen is MPL. In some embodiments, the first tumor antigen is FLT3 and the second tumor antigen is ITGB3. In some embodiments, the first tumor antigen is FLT3 and the second tumor antigen is ITGB2. In some embodiments, the first tumor antigen is FLT3 and the second tumor antigen is GP5. In some embodiments, the first tumor antigen is FLT3 and the second tumor antigen is GP6. In some embodiments, the first tumor antigen is FLT3 and the second tumor antigen is GP9. In some embodiments, the first tumor antigen is FLT3 and the second tumor antigen is GP1BA. In some embodiments, the first tumor antigen is FLT3 and the second tumor antigen is DSC2. In some embodiments, the first tumor antigen is FLT3 and the second tumor antigen is FCGR2A. In some embodiments, the first tumor antigen is FLT3 and the second tumor antigen is TNFRSF10A. In some embodiments, the first tumor antigen is FLT3 and the second tumor antigen is TNFRSF10B. In some embodiments, the first tumor antigen is FLT3 and the second tumor antigen is TM4SF1.

[0968] In some embodiments of the aforementioned aspects, the first tumor antigen is MPL and the second tumor antigen is CD34. In some embodiments, the first tumor antigen is MPL and the second tumor antigen is CD41. In some embodiments, the first tumor antigen is MPL and the second tumor antigen is G6B. In some embodiments, the first tumor antigen is MPL and the second tumor antigen is P-selectin. In some embodiments, the first tumor antigen is MPL and the second tumor antigen is Clec2. In some embodiments, the first tumor antigen is MPL and the second tumor antigen is cKIT. In some embodiments, the first tumor antigen is MPL and the second tumor antigen is FLT3. In some embodiments, the first tumor antigen is MPL and the second tumor antigen is MPL. In some embodiments, the first tumor antigen is MPL and the second tumor antigen is ITGB3. In some embodiments, the first tumor antigen is MPL and the second tumor antigen is ITGB2. In some embodiments, the first tumor antigen is MPL and the second tumor antigen is GP5. In some embodiments, the first tumor antigen is MPL and the second tumor antigen is GP6. In some embodiments, the first tumor antigen is MPL and the second tumor antigen is GP9. In some embodiments, the first tumor antigen is MPL and the second tumor antigen is GP1BA. In some embodiments, the first tumor antigen is MPL and the second tumor antigen is DSC2. In some embodiments, the first tumor antigen is MPL and the second tumor antigen is FCGR2A. In some embodiments, the first tumor antigen is MPL and the second tumor antigen is TNFRSF10A. In some embodiments, the first tumor antigen is MPL and the second tumor antigen is TNFRSF10B. In some embodiments, the first tumor antigen is MPL and the second tumor antigen is TM4SF1.

[0969] In some embodiments of the aforementioned aspects, the first tumor antigen is ITGB3 and the second tumor antigen is CD34. In some embodiments, the first tumor antigen is ITGB3 and the second tumor antigen is CD41. In some embodiments, the first tumor antigen is ITGB3 and the second tumor antigen is G6B. In some embodiments, the first tumor antigen is ITGB3 and the second tumor antigen is P-selectin. In some embodiments, the first tumor antigen is ITGB3 and the second tumor antigen is Clec2. In some embodiments, the first tumor antigen is ITGB3 and the second tumor antigen is cKIT. In some embodiments, the first tumor antigen is ITGB3 and the second tumor antigen is FLT3. In some embodiments, the first tumor antigen is ITGB3 and the second tumor antigen is MPL. In some embodiments, the first tumor antigen is ITGB3 and the second tumor antigen is ITGB3. In some embodiments, the first tumor antigen is ITGB3 and the second tumor antigen is ITGB2. In some embodiments, the first tumor antigen is ITGB3 and the second tumor antigen is GP5. In some embodiments, the first tumor antigen is ITGB3 and the second tumor antigen is GP6. In some embodiments, the first tumor antigen is ITGB3 and the second tumor antigen is GP9. In some embodiments, the first tumor antigen is ITGB3 and the second tumor antigen is GP1BA. In some embodiments, the first tumor antigen is ITGB3 and the second tumor antigen is DSC2. In some embodiments, the first tumor antigen is ITGB3 and the second tumor antigen is FCGR2A. In some embodiments, the first tumor antigen is ITGB3 and the second tumor antigen is TNFRSF10A. In some embodiments, the first tumor antigen is ITGB3 and the second tumor antigen is TNFRSF10B. In some embodiments, the first tumor antigen is ITGB3 and the second tumor antigen is TM4SF1.

[0970] In some embodiments of the aforementioned aspects, the first tumor antigen is ITGB2 and the second tumor antigen is CD34. In some embodiments, the first tumor antigen is ITGB2 and the second tumor antigen is CD41. In some embodiments, the first tumor antigen is ITGB2 and the second tumor antigen is G6B. In some embodiments, the first tumor antigen is ITGB2 and the second tumor antigen is P-selectin. In some embodiments, the first tumor antigen is ITGB2 and the second tumor antigen is Clec2. In some embodiments, the first tumor antigen is ITGB2 and the second tumor antigen is cKIT. In some embodiments, the first tumor antigen is ITGB2 and the second tumor antigen is FLT3. In some embodiments, the first tumor antigen is ITGB2 and the second tumor antigen is MPL. In some embodiments, the first tumor antigen is ITGB2 and the second tumor antigen is ITGB3. In some embodiments, the first tumor antigen is ITGB2 and the second tumor antigen is ITGB2. In some embodiments, the first tumor antigen is ITGB2 and the second tumor antigen is GP5. In some embodiments, the first tumor antigen is ITGB2 and the second tumor antigen is GP6. In some embodiments, the first tumor antigen is ITGB2 and the second tumor antigen is GP9. In some embodiments, the first tumor antigen is ITGB2 and the second tumor antigen is GP1BA. In some embodiments, the first tumor antigen is ITGB2 and the second tumor antigen is DSC2. In some embodiments, the first tumor antigen is ITGB2 and the second tumor antigen is FCGR2A. In some embodiments, the first tumor antigen is ITGB2 and the second tumor antigen is TNFRSF10A. In some embodiments, the first tumor antigen is ITGB2 and the second tumor antigen is TNFRSF10B. In some embodiments, the first tumor antigen is ITGB2 and the second tumor antigen is TM4SF1.

[0971] In some embodiments of the aforementioned aspects, the first tumor antigen is GP5 and the second tumor antigen is CD34. In some embodiments, the first tumor antigen is GP5 and the second tumor antigen is CD41. In some embodiments, the first tumor antigen is GP5 and the second tumor antigen is G6B. In some embodiments, the first tumor antigen is GP5 and the second tumor antigen is P-selectin. In some embodiments, the first tumor antigen is GP5 and the second tumor antigen is Clec2. In some embodiments, the first tumor antigen is GP5 and the second tumor antigen is cKIT. In some embodiments, the first tumor antigen is GP5 and the second tumor antigen is FLT3. In some embodiments, the first tumor antigen is GP5 and the second tumor antigen is MPL. In some embodiments, the first tumor antigen is GP5 and the second tumor antigen is ITGB3. In some embodiments, the first tumor antigen is GP5 and the second tumor antigen is ITGB2. In some embodiments, the first tumor antigen is GP5 and the second tumor antigen is GP5. In some embodiments, the first tumor antigen is GP5 and the second tumor antigen is GP6. In some embodiments, the first tumor antigen is GP5 and the second tumor antigen is GP9. In some embodiments, the first tumor antigen is GP5 and the second tumor antigen is GP1BA. In some embodiments, the first tumor antigen is GP5 and the second tumor antigen is DSC2. In some embodiments, the first tumor antigen is GP5 and the second tumor antigen is FCGR2A. In some embodiments, the first tumor antigen is GP5 and the second tumor antigen is TNFRSF10A. In some embodiments, the first tumor antigen is GP5 and the second tumor antigen is TNFRSF10B. In some embodiments, the first tumor antigen is GP5 and the second tumor antigen is TM4SF1.

[0972] In some embodiments of the aforementioned aspects, the first tumor antigen is GP6 and the second tumor antigen is CD34. In some embodiments, the first tumor antigen is GP6 and the second tumor antigen is CD41. In some embodiments, the first tumor antigen is GP6 and the second tumor antigen is G6B. In some embodiments, the first tumor antigen is GP6 and the second tumor antigen is P-selectin. In some embodiments, the first tumor antigen is GP6 and the second tumor antigen is Clec2. In some embodiments, the first tumor antigen is GP6 and the second tumor antigen is cKIT. In some embodiments, the first tumor antigen is GP6 and the second tumor antigen is FLT3. In some embodiments, the first tumor antigen is GP6 and the second tumor antigen is MPL. In some embodiments, the first tumor antigen is GP6 and the second tumor antigen is ITGB3. In some embodiments, the first tumor antigen is GP6 and the second tumor antigen is ITGB2. In some embodiments, the first tumor antigen is GP6 and the second tumor antigen is GP5. In some embodiments, the first tumor antigen is GP6 and the second tumor antigen is GP6. In some embodiments, the first tumor antigen is GP6 and the second tumor antigen is GP9. In some embodiments, the first tumor antigen is GP6 and the second tumor antigen is GP1BA. In some embodiments, the first tumor antigen is GP6 and the second tumor antigen is DSC2. In some embodiments, the first tumor antigen is GP6 and the second tumor antigen is FCGR2A. In some embodiments, the first tumor antigen is GP6 and the second tumor antigen is TNFRSF10A. In some embodiments, the first tumor antigen is GP6 and the second tumor antigen is TNFRSF10B. In some embodiments, the first tumor antigen is GP6 and the second tumor antigen is TM4SF1.

[0973] In some embodiments of the aforementioned aspects, the first tumor antigen is GP9 and the second tumor antigen is CD34. In some embodiments, the first tumor antigen is GP9 and the second tumor antigen is CD41. In some embodiments, the first tumor antigen is GP9 and the second tumor antigen is G6B. In some embodiments, the first tumor antigen is GP9 and the second tumor antigen is P-selectin. In some embodiments, the first tumor antigen is GP9 and the second tumor antigen is Clec2. In some embodiments, the first tumor antigen is GP9 and the second tumor antigen is cKIT. In some embodiments, the first tumor antigen is GP9 and the second tumor antigen is FLT3. In some embodiments, the first tumor antigen is GP9 and the second tumor antigen is MPL. In some embodiments, the first tumor antigen is GP9 and the second tumor antigen is ITGB3. In some embodiments, the first tumor antigen is GP9 and the second tumor antigen is ITGB2. In some embodiments, the first tumor antigen is GP9 and the second tumor antigen is GP5. In some embodiments, the first tumor antigen is GP9 and the second tumor antigen is GP6. In some embodiments, the first tumor antigen is GP9 and the second tumor antigen is GP9. In some embodiments, the first tumor antigen is GP9 and the second tumor antigen is GP1BA. In some embodiments, the first tumor antigen is GP9 and the second tumor antigen is DSC2. In some embodiments, the first tumor antigen is GP9 and the second tumor antigen is FCGR2A. In some embodiments, the first tumor antigen is GP9 and the second tumor antigen is TNFRSF10A. In some embodiments, the first tumor antigen is GP9 and the second tumor antigen is TNFRSF10B. In some embodiments, the first tumor antigen is GP9 and the second tumor antigen is TM4SF1.

[0974] In some embodiments of the aforementioned aspects, the first tumor antigen is GP1BA and the second tumor antigen is CD34. In some embodiments, the first tumor antigen is GP1BA and the second tumor antigen is CD41. In some embodiments, the first tumor antigen is GP1BA and the second tumor antigen is G6B. In some embodiments, the first tumor antigen is GP1BA and the second tumor antigen is P-selectin. In some embodiments, the first tumor antigen is GP1BA and the second tumor antigen is Clec2. In some embodiments, the first tumor antigen is GP1BA and the second tumor antigen is cKIT. In some embodiments, the first tumor antigen is GP1BA and the second tumor antigen is FLT3. In some embodiments, the first tumor antigen is GP1BA and the second tumor antigen is MPL. In some embodiments, the first tumor antigen is GP1BA and the second tumor antigen is ITGB3. In some embodiments, the first tumor antigen is GP1BA and the second tumor antigen is ITGB2. In some embodiments, the first tumor antigen is GP1BA and the second tumor antigen is GP5. In some embodiments, the first tumor antigen is GP1BA and the second tumor antigen is GP6. In some embodiments, the first tumor antigen is GP1BA and the second tumor antigen is GP9. In some embodiments, the first tumor antigen is GP1BA and the second tumor antigen is GP1BA. In some embodiments, the first tumor antigen is GP1BA and the second tumor antigen is DSC2. In some embodiments, the first tumor antigen is GP1BA and the second tumor antigen is FCGR2A. In some embodiments, the first tumor antigen is GP1BA and the second tumor antigen is TNFRSF10A. In some embodiments, the first tumor antigen is GP1BA and the second tumor antigen is TNFRSF10B. In some embodiments, the first tumor antigen is GP1BA and the second tumor antigen is TM4SF1.

[0975] In some embodiments of the aforementioned aspects, the first tumor antigen is DSC2 and the second tumor antigen is CD34. In some embodiments, the first tumor antigen is DSC2 and the second tumor antigen is CD41. In some embodiments, the first tumor antigen is DSC2 and the second tumor antigen is G6B. In some embodiments, the first tumor antigen is DSC2 and the second tumor antigen is P-selectin. In some embodiments, the first tumor antigen is DSC2 and the second tumor antigen is Clec2. In some embodiments, the first tumor antigen is DSC2 and the second tumor antigen is cKIT. In some embodiments, the first tumor antigen is DSC2 and the second tumor antigen is FLT3. In some embodiments, the first tumor antigen is DSC2 and the second tumor antigen is MPL. In some embodiments, the first tumor antigen is DSC2 and the second tumor antigen is ITGB3. In some embodiments, the first tumor antigen is DSC2 and the second tumor antigen is ITGB2. In some embodiments, the first tumor antigen is DSC2 and the second tumor antigen is GP5. In some embodiments, the first tumor antigen is DSC2 and the second tumor antigen is GP6. In some embodiments, the first tumor antigen is DSC2 and the second tumor antigen is GP9. In some embodiments, the first tumor antigen is DSC2 and the second tumor antigen is GP1BA. In some embodiments, the first tumor antigen is DSC2 and the second tumor antigen is DSC2. In some embodiments, the first tumor antigen is DSC2 and the second tumor antigen is FCGR2A. In some embodiments, the first tumor antigen is DSC2 and the second tumor antigen is TNFRSF10A. In some embodiments, the first tumor antigen is DSC2 and the second tumor antigen is TNFRSF10B. In some embodiments, the first tumor antigen is DSC2 and the second tumor antigen is TM4SF1.

[0976] In some embodiments of the aforementioned aspects, the first tumor antigen is FCGR2A and the second tumor antigen is CD34. In some embodiments, the first tumor antigen is FCGR2A and the second tumor antigen is CD41. In some embodiments, the first tumor antigen is FCGR2A and the second tumor antigen is G6B. In some embodiments, the first tumor antigen is FCGR2A and the second tumor antigen is P-selectin. In some embodiments, the first tumor antigen is FCGR2A and the second tumor antigen is Clec2. In some embodiments, the first tumor antigen is FCGR2A and the second tumor antigen is cKIT. In some embodiments, the first tumor antigen is FCGR2A and the second tumor antigen is FLT3. In some embodiments, the first tumor antigen is FCGR2A and the second tumor antigen is MPL. In some embodiments, the first tumor antigen is FCGR2A and the second tumor antigen is ITGB3. In some embodiments, the first tumor antigen is FCGR2A and the second tumor antigen is ITGB2. In some embodiments, the first tumor antigen is FCGR2A and the second tumor antigen is GP5. In some embodiments, the first tumor antigen is FCGR2A and the second tumor antigen is GP6. In some embodiments, the first tumor antigen is FCGR2A and the second tumor antigen is GP9. In some embodiments, the first tumor antigen is FCGR2A and the second tumor antigen is GP1BA. In some embodiments, the first tumor antigen is FCGR2A and the second tumor antigen is DSC2. In some embodiments, the first tumor antigen is FCGR2A and the second tumor antigen is FCGR2A. In some embodiments, the first tumor antigen is FCGR2A and the second tumor antigen is TNFRSF10A. In some embodiments, the first tumor antigen is FCGR2A and the second tumor antigen is TNFRSF10B. In some embodiments, the first tumor antigen is FCGR2A and the second tumor antigen is TM4SF1.

[0977] In some embodiments of the aforementioned aspects, the first tumor antigen is TNFRSF10A and the second tumor antigen is CD34. In some embodiments, the first tumor antigen is TNFRSF10A and the second tumor antigen is CD41. In some embodiments, the first tumor antigen is TNFRSF10A and the second tumor antigen is G6B. In some embodiments, the first tumor antigen is TNFRSF10A and the second tumor antigen is P-selectin. In some embodiments, the first tumor antigen is TNFRSF10A and the second tumor antigen is Clec2. In some embodiments, the first tumor antigen is TNFRSF10A and the second tumor antigen is cKIT. In some embodiments, the first tumor antigen is TNFRSF10A and the second tumor antigen is FLT3. In some embodiments, the first tumor antigen is TNFRSF10A and the second tumor antigen is MPL. In some embodiments, the first tumor antigen is TNFRSF10A and the second tumor antigen is ITGB3. In some embodiments, the first tumor antigen is TNFRSF10A and the second tumor antigen is ITGB2. In some embodiments, the first tumor antigen is TNFRSF10A and the second tumor antigen is GP5. In some embodiments, the first tumor antigen is TNFRSF10A and the second tumor antigen is GP6. In some embodiments, the first tumor antigen is TNFRSF10A and the second tumor antigen is GP9. In some embodiments, the first tumor antigen is TNFRSF10A and the second tumor antigen is GP1BA. In some embodiments, the first tumor antigen is TNFRSF10A and the second tumor antigen is DSC2. In some embodiments, the first tumor antigen is TNFRSF10A and the second tumor antigen is FCGR2A. In some embodiments, the first tumor antigen is TNFRSF10A and the second tumor antigen is TNFRSF10A. In some embodiments, the first tumor antigen is TNFRSF10A and the second tumor antigen is TM4SF1.

[0978] In some embodiments of the aforementioned aspects, the first tumor antigen is TNFRSF10B and the second tumor antigen is CD34. In some embodiments, the first tumor antigen is TNFRSF10B and the second tumor antigen is CD41. In some embodiments, the first tumor antigen is TNFRSF10B and the second tumor antigen is G6B. In some embodiments, the first tumor antigen is TNFRSF10B and the second tumor antigen is P-selectin. In some embodiments, the first tumor antigen is TNFRSF10B and the second tumor antigen is Clec2. In some embodiments, the first tumor antigen is TNFRSF10B and the second tumor antigen is cKIT. In some embodiments, the first tumor antigen is TNFRSF10B and the second tumor antigen is FLT3. In some embodiments, the first tumor antigen is TNFRSF10B and the second tumor antigen is MPL. In some embodiments, the first tumor antigen is TNFRSF10B and the second tumor antigen is ITGB3. In some embodiments, the first tumor antigen is TNFRSF10B and the second tumor antigen is ITGB2. In some embodiments, the first tumor antigen is TNFRSF10B and the second tumor antigen is GP5. In some embodiments, the first tumor antigen is TNFRSF10B and the second tumor antigen is GP6. In some embodiments, the first tumor antigen is TNFRSF10B and the second tumor antigen is GP9. In some embodiments, the first tumor antigen is TNFRSF10B and the second tumor antigen is GP1BA. In some embodiments, the first tumor antigen is TNFRSF10B and the second tumor antigen is DSC2. In some embodiments, the first tumor antigen is TNFRSF10B and the second tumor antigen is FCGR2A. In some embodiments, the first tumor antigen is TNFRSF10B and the second tumor antigen is TNFRSF10B. In some embodiments, the first tumor antigen is TNFRSF10B and the second tumor antigen is TM4SF1.

[0979] In some embodiments of the aforementioned aspects, the first tumor antigen is TM4SF1 and the second tumor antigen is CD34. In some embodiments, the first tumor antigen is TM4SF1 and the second tumor antigen is CD41. In some embodiments, the first tumor antigen is TM4SF1 and the second tumor antigen is G6B. In some embodiments, the first tumor antigen is TM4SF1 and the second tumor antigen is P-selectin. In some embodiments, the first tumor antigen is TM4SF1 and the second tumor antigen is Clec2. In some embodiments, the first tumor antigen is TM4SF1 and the second tumor antigen is cKIT. In some embodiments, the first tumor antigen is TM4SF1 and the second tumor antigen is FLT3. In some embodiments, the first tumor antigen is TM4SF1 and the second tumor antigen is MPL. In some embodiments, the first tumor antigen is TM4SF1 and the second tumor antigen is ITGB3. In some embodiments, the first tumor antigen is TM4SF1 and the second tumor antigen is ITGB2. In some embodiments, the first tumor antigen is TM4SF1 and the second tumor antigen is GP5. In some embodiments, the first tumor antigen is TM4SF1 and the second tumor antigen is GP6. In some embodiments, the first tumor antigen is TM4SF1 and the second tumor antigen is GP9. In some embodiments, the first tumor antigen is TM4SF1 and the second tumor antigen is GP1BA. In some embodiments, the first tumor antigen is TM4SF1 and the second tumor antigen is DSC2. In some embodiments, the first tumor antigen is TM4SF1 and the second tumor antigen is FCGR2A. In some embodiments, the first tumor antigen is TM4SF1 and the second tumor antigen is TNFRSF10A. In some embodiments, the first tumor antigen is TM4SF1 and the second tumor antigen is TNFRSF10B. In some embodiments, the first tumor antigen is TM4SF1 and the second tumor antigen is TM4SF1.

### Antibody Molecules Targeting Tumor Antigens

[0980] In some embodiments, the tumor-targeting moiety comprises a CDR, a framework region, or a variable region sequence shown in Table 38 (or a sequence having at least about 75%, 80%, 85%, 90%, 95%, or 99% sequence identity thereto).

TABLE 38
Sequences for exemplary antibodies capable of binding to exemplary target molecules

| Target | Description | SEQ ID NO | Sequence |
|---|---|---|---|
| CD34 | Exemplary | SEQ ID | EVQLQQSGPELVKPGASVKISCKASGYSFIGYFMNWV |
| | anti-CD34 | NO: 2001 | MQSHGRSLEWIGRINPYNGYTFYNQKFKGKATLTVD |
| | VH | | KSSSTAHMELRSLASEDSAVYYCARHFRYDGVFYYA |
| | | | MDYWGQGTSVTVSS |
| | Exemplary | SEQ ID | QLVLTQSSSASFSLGASAKLTCTLSSQHSTFTIEWYQQ |
| | anti-CD34 | NO: 2002 | QPLKPPKYVMDLKKDGSHSTGDGVPDRFSGSSSGAD |
| | VL | | RYLSISNIQPEDEATYICGVGDTIKEQFVYVFGGGTKV |
| | | | TVL |
| cKIT | Exemplary | SEQ ID | EVQLVESGGGLVQPGGSLRLSCAASGFAFSGYYMAW |
| (CD117) | anti-cKIT | NO: 2003 | VRQAPGKGLEWVANINYPGSSTYYLDSVKGRFTISRD |
| | VH | | NAKNSLYLQMNSLRAEDTAVYYCARGDYYGTTYWY |
| | | | FDVWGQGTTVTVSS |
| | Exemplary | SEQ ID | DIQMTQSPSSLSASVGDRVTITCRASQSISSYLNWYQQ |
| | anti-cKIT | NO: 2004 | KPGKAPKLLIYYTSRLQSGVPSRFSGSGSGTDFTLTISS |
| | VL | | LQPEDFATYYCQQGRRLWSFGGGTKVEIK |
| FLT3 | Exemplary | SEQ ID | QVQLQQPGAELVKPGASLKLSCKSSGYTFTSYWMHW |
| | anti-FLT3 | NO: 2005 | VRQRPGHGLEWIGEIDPSDSYKDYNQKFKDKATLTVD |
| | VH | | RSSNTAYMHLSSLTSDDSAVYYCARAITTTPFDFWGQ |
| | | | GTTLTVSS |
| | Exemplary | SEQ ID | DIVLTQSPATLSVTPGDSVSLSCRASQSISNNLHWYQQ |
| | anti-FLT3 | NO: 2006 | KSHESPRLLIKYASQSISGIPSRFSGSGSGTDFTLSINSV |
| | VL | | ETEDFGVYFCQQSNTWPYTFGGGTKLEIKR |
| CD41 | Exemplary | SEQ ID | EVQLQQSGAELVKPGASVKLSCTASGFNIKDTYVHW |
| (ITGA2B) | anti-CD41 | NO: 2007 | VKQRPEQGLEWIGRIDPANGYTKYDPKFQGKATITAD |
| | VH | | TSSNTAYLQLSSLTSEDTAVYYCVRPLYDYYAMDYW |
| | | | GQGTSVTVSS |
| | Exemplary | SEQ ID | DILMTQSPSSMSVSLGDTVSITCHASQGISSNIGWLQQ |
| | anti-CD41 | NO: 2008 | KPGKSFMGLIYYGTNLVDGVPSRFSGSGSGADYSLTIS |
| | VL | | SLDSEDFADYYCVQYAQLPYTFGGGTKLEIK |
| MPL | 1.75 VH | SEQ ID | EVLVESGGGLVQPKGSLKLSCAASGFSFNTYAMNW |
| | | NO: 2009 | VRQAPGKGLEWIAHIRSKSNNFATYYADSVKDRFSIS |
| | | | RDASENILFLQMNNLKTEDTAMYYCVRQGGDFPMDY |
| | | | WGQGTSVTVSS |
| | 1.75 VL | SEQ ID | QIVLTQSPAIMSASPGEKVTISCSASSSVSYMYWYQQK |
| | | NO: 2010 | PGSSPKPWIYRTSNLASGVPARFSGSGSGTSYSLTISN |
| | | | MEAEDAAAYYCQQYHSYPTTFGGGTKLEVK |
| | 1.78 VH | SEQ ID | QVQLQQSGPELVKPGASVKMSCKASGYAFSSSWLNW |
| | | NO: 2011 | VRQRPGKGLEWIGRIYPGDGENHYNGKFKGKATLTA |
| | | | DKSSSTGYMQLSSLTSEDSAVYFCASYYEGGYWGQG |
| | | | TLITVSA |
| | 1.78 VL | SEQ ID | DIVMTQAAPSIPVTPGESVSISCRSDKSLLHSNGNTYLF |
| | | NO: 2012 | WFLQRPGQSPQLLIYRMSNLASGVPDRFSGSGSGTAF |
| | | | TLRISGVEAEDVGVYYCMQHLEYPYTFGGGTKLEIK |
| P- | Exemplary | SEQ ID | EVLVESGGGLVRPGGSLRLSCAASGFTFSNYDMHW |
| Selectin | anti-P- | NO: 2013 | VRQATGKGLEWVSAITAAGDIYYPGSVKGRFTISREN |
| (SELP) | Selectin VH | | AKNSLYLQMNSLRAGDTAVYYCARGRYSGSGSYYN |
| | | | DWFDPWGQGTLVTVSS |
| | Exemplary | SEQ ID | EIVLTQSPATLSLSPGERATLSCRASQSVSSYLAWYQQ |
| | anti-P- | NO: 2014 | KPGQAPRLLIYDASNRATGIPARFSGSGSGTDFTLTISS |
| | Selectin VL | | LEPEDFAVYYCQQRSNWPLTFGGGTKVEIK |
| DSC2 | Exemplary | SEQ ID | MDSRLNLVFLVLILKGVQCDVQLVESGGGLVQPGGS |
| | anti-DSC2 | NO: 2015 | RKLSCAASGFTFSSFGMHWVRQAPEKGLEWVAYISSG |
| | #1 VH | | SSTIYYADTVKGRFTISRDNPKNTLFLQMTSLRSEDTA |
| | | | MYYCARVHYYYFDYWGQGTTLTVSS |
| | Exemplary | SEQ ID | MRPSIQFLGLLLFWLHGAQCDIQMTQSPSSLSASLGGK |
| | anti-DSC2 | NO: 2016 | VTITCKASQDINKYIAWYQHKPGKGPRLLIHYTSTLQP |
| | #1 VL | | GIPSRFSGSGSGRDYSFSISNLEPEDIATYYCLQYDNLW |
| | | | TFGGGTKL |
| | Exemplary | SEQ ID | MAWVWTLLFLMAAAQSIQAQIQLVQSGPELKKPGET |
| | anti-DSC2 | NO: 2017 | VKISCKASGYTFTDYSMHWVKQAPGKGLKWMGWIN |
| | #2 VH | | TETGEPTYADDFKGRFAFSLETSASTAYLQINNLKNED |
| | | | TATYFCARWLLFDYWGQGTTLTVSS |
| | Exemplary | SEQ ID | MESQTQVLMFLLLWVSGACADIVMTQSPSSLAMSVG |
| | anti-DSC2 | NO: 2018 | QKVTMSCKSSQSLLNSSNQKNYLAWYQQKPGQSPKL |
| | #2 VL | | LVYFASTRESGVPDRFIGSGSGTDFTLTISSVQAEDLA |
| | | | DYFCQQHYSTPLTFGAGTKL |
| FCGR2A | AT-10 VH | SEQ ID | EVKLEESGGGLVQPGGSMKLSCVASGFTFSYYWMN |
| (CD32a) | | NO: 2019 | WVRQSPEKGLEWVAEIRLKSNNYATHYAESVKGRFTI |
| | | | SRDDSKNNVYLQMNNLRAEDTGIYYCNRRDEYYAM |
| | | | DYWGQGTSVSVSS |
| | AT-10 VL | SEQ ID | DIVLTQSPGSLAVSLGQRATISCRASESVDNFGISFMN |
| | | NO: 2020 | WFQQKPGQPPRLLIYGASNQGSGVPARFSGSGSGTDF |
| | | | SLNIHPVEEDDAAMYFCQQSKEVPWTFGGGTKLEIK |
| | IV.3 VH | SEQ ID | QIQLVQSGPELKKPGETVKISCKASGYTFTNYGMNWV |
| | | NO: 2021 | KQAPGKGLKWMGWLNTYTGESIYPDDFKGRFAFSSE |
| | | | TSASTAYLQINNLKNEDMATYFCARGDYGYDDPLDY |
| | | | WGQGTSVTVSS |
| | IV.3 VL | SEQ ID | DIVMTQAAPSVPVTPGESVSISCRSSKSLLHTNGNTYL |
| | | NO: 2022 | HWFLQRPGQSPQLLIYRMSVLASGVPDRFSGSGSGTA |
| | | | FTLSISRVEAEDVGVFYCMQHLEYPLTFGAGTKLELK |
| | MDE-8 VH | SEQ ID | QVHLVESGGGVVQPGRSLRLSCAASGFTFSSYGMHW |
| | | NO: 2023 | VRQAPGKGLEWVAVIWYDGSNYYYTDSVKGRFTISR |
| | | | DNSKNTLYLQMNSLRAEDTAVYYCARDLGAAASDY |
| | | | WGQGTLVTVSS |
| | MDE-8 VL | SEQ ID | AIQLTQSPSSLSASVGDRVTITCRASQGINSALAWYQQ |
| | | NO: 2024 | KPGKAPKLLIYDASSLESGVPSRFSGSGSGTDFTLTISS |
| | | | LQPEDFATYYCQQFNSYPHTFGQGTKLEIK |
| TNFRS | E-11-13 VH | SEQ ID | MDLMCKKMKHLWFFLLLVAAPRWVLSQLQLQESGP |
| F10A | | NO: 2025 | GLVKPSETLSLTCTVSGGSIISKSSYWGWIRQPPGKGL |
| or | | | EWIGSIYYSGSTFYNPSLKSRVTISVDTSKNQFSLKLSS |
| TNFRS | | | VTAADTAVYYCARLTVAEFDYWGQGTLVTVSSAS |
| F10B | E-11-13 VL | SEQ ID | MEAPAQLLFLLLLWLPDTTGEIVLTQSPATLSLSPGER |
| | | NO: 2026 | ATLSCRASQSVSSFLAWYQQKPGQAPRLLIYDASNRA |
| | | | TGIPARFSGSGSGTDFTLTISSLEPEDFAVYYCQQRSN |
| | | | WPLTFGPGTKVDIKRT |
| | L-30-10 VH | SEQ ID | MDLMCKKMKHLWFFLLLVAAPRWVLSQLQLQESGP |
| | | NO: 2027 | GLVKPSETLSLTCTVSGGSISSRSNYWGWIRQPPGKGL |
| | | | EWIGNVYYRGSTYYNSSLKSRVTISVDTSKNQFSLKLS |
| | | | SVTVADTAVYYCARLSVAEFDYWGQGILVTVSSAS |
| | L-30-10 VL | SEQ ID | MEAPAQLLFLLLLWLPDTTGEIVLTQSPATLSLSPGER |
| | | NO: 2028 | ATLSCRASQSVSSFLAWYQQKPGQAPRLLIYDASNRA |
| | | | TGSPARFSGSGSGTDFTLTISSLEPEDFAVYYCQQRSD |
| | | | WPLTFGPGTKVDIKRT |
| | H-48-2 VH | SEQ ID | MDLMCKKMKHLWFFLLLVAAPRWVLSQLQLQESGP |
| | | NO: 2029 | GLVKPSETLSLTCTVSGGSISSSSYYWGWVRQPPGKG |
| | | | LEWIGSIHYSGSTFYNPSLKSRVTISVDTSKNQFSLKLS |
| | | | SVTAADTTVYYCARQGSTVVRGVYYYGMDVWGQG |
| | | | TTVTVSSAS |
| | H-48-2 VL | SEQ ID | METPAQLLFLLLLWLPDTTGEIVLTQSPGTLSLSPGER |
| | | NO: 2030 | ATLSCRASQSVSSSYLAWYQQKPGQAPRLLIYGASSR |
| | | | ATGIPDRFSGSGSGTDFTLTISRLEPEDFAVYYCQQYG |
| | | | SSPLYTFGQGTKLEIKRT |
| | 0304 VH | SEQ ID | MDWTWRILFLVAAATSAHSQVQLVQSGAEMKKPGA |
| | | NO: 2031 | SVKVSCKTSGYTFTNYKINWVRQAPGQGLEWMGWM |
| | | | NPDTDSTGYPQKFQGRVTMTRNTSISTAYMELSSLRS |
| | | | EDTAVYYCARSYGSGSYYRDYYYGMDVWGQGTTVT |
| | | | VSS |
| | 0304 VL | SEQ ID | MEAPAQLLFLLLLWLPDTTGEIVLTQSPATLSLSPGER |
| | | NO: 2032 | ATLSCRASQSVSSYLAWYQQKPGQAPRLLIYDASNRA |
| | | | TGIPARFSGSGSGTDFTLTISSLEPEDFAVYYCQQRSN |
| | | | WPLTFGGGTKVEIKR |
| | KMTR1 VH | SEQ ID | MEFGLSWLFLVAILKGVQCEVQLLESGGGLVQPGRSL |
| | | NO: 2033 | RLSCAASGFTFSSYAMSWVRQAPGKGLEWVSAISGSG |
| | | | GSRYYADSVKGRFTISRDNSKNTLYLQMNSLRAEDTA |
| | | | VYYCAKESSGWFGAFDYWGQGTLVTVSS |
| | KMTRI VL | SEQ ID | MSPSQLIGFLLLWVPASRGEIVLTQSPDFQSVTPKEKV |
| | | NO: 2034 | TITCRASQSIGSSLHWYQQKPDQSPKLLIKYASQSFSG |
| | | | VPSRFSGSGSGTDFTLTINSLEAEDAAAYYCHQSSSLPI |
| | | | TFGQGTRLEIKR |
| TM4SF1 | Exemplary | SEQ ID | EVILVESGGGLVKPGGSLKLSCAASGFTFSSFAMSWV |
| | anti- | NO: 2035 | RQTPEKRLEWVATISSGSIYIYYTDGVKGRFTISRDNA |
| | TM4SF1 | | KNTVHLQMSSLRSEDTAMYYCARRGIYYGYDGYAM |
| | VH | | DYWGQGTSVTVSS |
| | Exemplary | SEQ ID | AVVMTQTPLSLPVSLGDQASISCRSSQSLVHSNGNTYL |
| | anti- | NO: 2036 | HWYMQKPGQSPKVLIYKVSNRFSGVPDRFSGSGSGTD |
| | TM4SF1 | | FTLKISRVEADDLGIYFCSQSTHIPLAFGAGTKLELK |
| | VL | | |

[0981] In some embodiments, the first, second, or third tumor antigen is CD34. In some embodiments, the first, second, or third tumor-targeting moiety comprises:
[0982] (i) a HCDR1, HCDR2, and/or HCDR3 from SEQ ID NO: 2001 (or a sequence with no more than 1, 2, 3, or 4 mutations, e.g., substitutions, additions, or deletions),
[0983] (ii) a VH of SEQ ID NO: 2001 (or a sequence having at least about 75%, 80%, 85%, 90%, 95%, or 99% sequence identity thereto),
[0984] (iii) a LCDR1, LCDR2, and/or LCDR3 from SEQ ID NO: 2002 (or a sequence with no more than 1, 2, 3, or 4 mutations, e.g., substitutions, additions, or deletions), and/or
[0985] (iv) a VL of SEQ ID NO: 2002 (or a sequence having at least about 75%, 80%, 85%, 90%, 95%, or 99% sequence identity thereto).

[0986] In some embodiments, wherein the first, second, or third tumor antigen is CD41. In some embodiments, the first, second, or third tumor-targeting moiety comprises:
[0987] (i) a HCDR1, HCDR2, and/or HCDR3 from SEQ ID NO: 2007 (or a sequence with no more than 1, 2, 3, or 4 mutations, e.g., substitutions, additions, or deletions),
[0988] (ii) a VH of SEQ ID NO: 2007 (or a sequence having at least about 75%, 80%, 85%, 90%, 95%, or 99% sequence identity thereto),
[0989] (iii) a LCDR1, LCDR2, and/or LCDR3 from SEQ ID NO: 2008 (or a sequence with no more than 1, 2, 3, or 4 mutations, e.g., substitutions, additions, or deletions), and/or
[0990] (iv) a VL of SEQ ID NO: 2008 (or a sequence having at least about 75%, 80%, 85%, 90%, 95%, or 99% sequence identity thereto).

[0991] In some embodiments, the first, second, or third tumor antigen is P-selectin. In some embodiments, the first, second, or third tumor-targeting moiety comprises:
[0992] (i) a HCDR1, HCDR2, and/or HCDR3 from SEQ ID NO: 2013 (or a sequence with no more than 1, 2, 3, or 4 mutations, e.g., substitutions, additions, or deletions),
[0993] (ii) a VH of SEQ ID NO: 2013 (or a sequence having at least about 75%, 80%, 85%, 90%, 95%, or 99% sequence identity thereto),
[0994] (iii) a LCDR1, LCDR2, and/or LCDR3 from SEQ ID NO: 2014 (or a sequence with no more than 1, 2, 3, or 4 mutations, e.g., substitutions, additions, or deletions), and/or
[0995] (iv) a VL of SEQ ID NO: 2014 (or a sequence having at least about 75%, 80%, 85%, 90%, 95%, or 99% sequence identity thereto).

[0996] In some embodiments, the first, second, or third tumor antigen is cKIT. In some embodiments, the first, second, or third tumor-targeting moiety comprises:
[0997] (i) a HCDR1, HCDR2, and/or HCDR3 from SEQ ID NO: 2003 (or a sequence with no more than 1, 2, 3, or 4 mutations, e.g., substitutions, additions, or deletions),
[0998] (ii) a VH of SEQ ID NO: 2003 (or a sequence having at least about 75%, 80%, 85%, 90%, 95%, or 99% sequence identity thereto),
[0999] (iii) a LCDR1, LCDR2, and/or LCDR3 from SEQ ID NO: 2004 (or a sequence with no more than 1, 2, 3, or 4 mutations, e.g., substitutions, additions, or deletions), and/or
[1000] (iv) a VL of SEQ ID NO: 2004 (or a sequence having at least about 75%, 80%, 85%, 90%, 95%, or 99% sequence identity thereto).

[1001] In some embodiments, the first, second, or third tumor antigen is FLT3. In some embodiments, the first, second, or third tumor-targeting moiety comprises:
[1002] (i) a HCDR1, HCDR2, and/or HCDR3 from SEQ ID NO: 2005 (or a sequence with no more than 1, 2, 3, or 4 mutations, e.g., substitutions, additions, or deletions),
[1003] (ii) a VH of SEQ ID NO: 2005 (or a sequence having at least about 75%, 80%, 85%, 90%, 95%, or 99% sequence identity thereto),
[1004] (iii) a LCDR1, LCDR2, and/or LCDR3 from SEQ ID NO: 2006 (or a sequence with no more than 1, 2, 3, or 4 mutations, e.g., substitutions, additions, or deletions), and/or
[1005] (iv) a VL of SEQ ID NO: 2006 (or a sequence having at least about 75%, 80%, 85%, 90%, 95%, or 99% sequence identity thereto).

[1006] In some embodiments, the first, second, or third tumor antigen is MPL. In some embodiments, the first, second, or third tumor-targeting moiety comprises:
[1007] (i) (a) a HCDR1, HCDR2, and/or HCDR3 from SEQ ID NO: 2009 (or a sequence with no more than 1, 2, 3, or 4 mutations, e.g., substitutions, additions, or deletions),
[1008] (b) a VH of SEQ ID NO: 2009 (or a sequence having at least about 75%, 80%, 85%, 90%, 95%, or 99% sequence identity thereto),
[1009] (c) a LCDR1, LCDR2, and/or LCDR3 from SEQ ID NO: 2010 (or a sequence with no more than 1, 2, 3, or 4 mutations, e.g., substitutions, additions, or deletions), and/or
[1010] (d) a VL of SEQ ID NO: 2010 (or a sequence having at least about 75%, 80%, 85%, 90%, 95%, or 99% sequence identity thereto); or
[1011] (ii) (a) a HCDR1, HCDR2, and/or HCDR3 from SEQ ID NO: 2011 (or a sequence with no more than 1, 2, 3, or 4 mutations, e.g., substitutions, additions, or deletions),
[1012] (b) a VH of SEQ ID NO: 2011 (or a sequence having at least about 75%, 80%, 85%, 90%, 95%, or 99% sequence identity thereto),
[1013] (c) a LCDR1, LCDR2, and/or LCDR3 from SEQ ID NO: 2012 (or a sequence with no more than 1, 2, 3, or 4 mutations, e.g., substitutions, additions, or deletions), and/or
[1014] (d) a VL of SEQ ID NO: 2012 (or a sequence having at least about 75%, 80%, 85%, 90%, 95%, or 99% sequence identity thereto).

[1015] In some embodiments, the first, second, or third tumor antigen is DSC2. In some embodiments, the first, second, or third tumor-targeting moiety comprises:
[1016] (i) (a) a HCDR1, HCDR2, and/or HCDR3 from SEQ ID NO: 2015 (or a sequence with no more than 1, 2, 3, or 4 mutations, e.g., substitutions, additions, or deletions),
[1017] (b) a VH of SEQ ID NO: 2015 (or a sequence having at least about 75%, 80%, 85%, 90%, 95%, or 99% sequence identity thereto),
[1018] (c) a LCDR1, LCDR2, and/or LCDR3 from SEQ ID NO: 2016 (or a sequence with no more than 1, 2, 3, or 4 mutations, e.g., substitutions, additions, or deletions), and/or
[1019] (d) a VL of SEQ ID NO: 2016 (or a sequence having at least about 75%, 80%, 85%, 90%, 95%, or 99% sequence identity thereto); or
[1020] (ii) (a) a HCDR1, HCDR2, and/or HCDR3 from SEQ ID NO: 2017 (or a sequence with no more than 1, 2, 3, or 4 mutations, e.g., substitutions, additions, or deletions),
[1021] (b) a VH of SEQ ID NO: 2017 (or a sequence having at least about 75%, 80%, 85%, 90%, 95%, or 99% sequence identity thereto),
[1022] (c) a LCDR1, LCDR2, and/or LCDR3 from SEQ ID NO: 2018 (or a sequence with no more than 1, 2, 3, or 4 mutations, e.g., substitutions, additions, or deletions), and/or
[1023] (d) a VL of SEQ ID NO: 2018 (or a sequence having at least about 75%, 80%, 85%, 90%, 95%, or 99% sequence identity thereto).

[1024] In some embodiments, the first, second, or third tumor antigen is FCGR2A. In some embodiments, the first, second, or third tumor-targeting moiety comprises:
[1025] (i) (a) a HCDR1, HCDR2, and/or HCDR3 from SEQ ID NO: 2019 (or a sequence with no more than 1, 2, 3, or 4 mutations, e.g., substitutions, additions, or deletions),
[1026] (b) a VH of SEQ ID NO: 2019 (or a sequence having at least about 75%, 80%, 85%, 90%, 95%, or 99% sequence identity thereto),
[1027] (c) a LCDR1, LCDR2, and/or LCDR3 from SEQ ID NO: 2020 (or a sequence with no more than 1, 2, 3, or 4 mutations, e.g., substitutions, additions, or deletions), and/or
[1028] (d) a VL of SEQ ID NO: 2020 (or a sequence having at least about 75%, 80%, 85%, 90%, 95%, or 99% sequence identity thereto);
[1029] (ii) (a) a HCDR1, HCDR2, and/or HCDR3 from SEQ ID NO: 2021 (or a sequence with no more than 1, 2, 3, or 4 mutations, e.g., substitutions, additions, or deletions),
[1030] (b) a VH of SEQ ID NO:20 21 (or a sequence having at least about 75%, 80%, 85%, 90%, 95%, or 99% sequence identity thereto),
[1031] (c) a LCDR1, LCDR2, and/or LCDR3 from SEQ ID NO: 2022 (or a sequence with no more than 1, 2, 3, or 4 mutations, e.g., substitutions, additions, or deletions), and/or
[1032] (d) a VL of SEQ ID NO: 2022 (or a sequence having at least about 75%, 80%, 85%, 90%, 95%, or 99% sequence identity thereto), or
[1033] (iii) (a) a HCDR1, HCDR2, and/or HCDR3 from SEQ ID NO: 2023 (or a sequence with no more than 1, 2, 3, or 4 mutations, e.g., substitutions, additions, or deletions),
[1034] (b) a VH of SEQ ID NO: 2023 (or a sequence having at least about 75%, 80%, 85%, 90%, 95%, or 99% sequence identity thereto),
[1035] (c) a LCDR1, LCDR2, and/or LCDR3 from SEQ ID NO: 2024 (or a sequence with no more than 1, 2, 3, or 4 mutations, e.g., substitutions, additions, or deletions), and/or
[1036] (d) a VL of SEQ ID NO: 2024 (or a sequence having at least about 75%, 80%, 85%, 90%, 95%, or 99% sequence identity thereto).

[1037] In some embodiments, the first, second, or third tumor antigen is TNFRSF10A or TNFRSF10B. In some embodiments, the first, second, or third tumor-targeting moiety comprises:
[1038] (i) (a) a HCDR1, HCDR2, and/or HCDR3 from SEQ ID NO: 2025 (or a sequence with no more than 1, 2, 3, or 4 mutations, e.g., substitutions, additions, or deletions),
[1039] (b) a VH of SEQ ID NO: 2025 (or a sequence having at least about 75%, 80%, 85%, 90%, 95%, or 99% sequence identity thereto),
[1040] (c) a LCDR1, LCDR2, and/or LCDR3 from SEQ ID NO: 2026 (or a sequence with no more than 1, 2, 3, or 4 mutations, e.g., substitutions, additions, or deletions), and/or
[1041] (d) a VL of SEQ ID NO: 2026 (or a sequence having at least about 75%, 80%, 85%, 90%, 95%, or 99% sequence identity thereto); or
[1042] (ii) (a) a HCDR1, HCDR2, and/or HCDR3 from SEQ ID NO: 2027 (or a sequence with no more than 1, 2, 3, or 4 mutations, e.g., substitutions, additions, or deletions),
[1043] (b) a VH of SEQ ID NO: 2027 (or a sequence having at least about 75%, 80%, 85%, 90%, 95%, or 99% sequence identity thereto),
[1044] (c) a LCDR1, LCDR2, and/or LCDR3 from SEQ ID NO: 2028 (or a sequence with no more than 1, 2, 3, or 4 mutations, e.g., substitutions, additions, or deletions), and/or
[1045] (d) a VL of SEQ ID NO: 2028 (or a sequence having at least about 75%, 80%, 85%, 90%, 95%, or 99% sequence identity thereto);
[1046] (iii) (a) a HCDR1, HCDR2, and/or HCDR3 from SEQ ID NO: 2029 (or a sequence with no more than 1, 2, 3, or 4 mutations, e.g., substitutions, additions, or deletions),
[1047] (b) a VH of SEQ ID NO: 2029 (or a sequence having at least about 75%, 80%, 85%, 90%, 95%, or 99% sequence identity thereto),
[1048] (c) a LCDR1, LCDR2, and/or LCDR3 from SEQ ID NO: 2030 (or a sequence with no more than 1, 2, 3, or 4 mutations, e.g., substitutions, additions, or deletions), and/or
[1049] (d) a VL of SEQ ID NO: 2030 (or a sequence having at least about 75%, 80%, 85%, 90%, 95%, or 99% sequence identity thereto);
[1050] (iv) (a) a HCDR1, HCDR2, and/or HCDR3 from SEQ ID NO: 2031 (or a sequence with no more than 1, 2, 3, or 4 mutations, e.g., substitutions, additions, or deletions),
[1051] (b) a VH of SEQ ID NO: 2031 (or a sequence having at least about 75%, 80%, 85%, 90%, 95%, or 99% sequence identity thereto),
[1052] (c) a LCDR1, LCDR2, and/or LCDR3 from SEQ ID NO: 2032 (or a sequence with no more than 1, 2, 3, or 4 mutations, e.g., substitutions, additions, or deletions), and/or
[1053] (d) a VL of SEQ ID NO: 2032 (or a sequence having at least about 75%, 80%, 85%, 90%, 95%, or 99% sequence identity thereto); or
[1054] (v) (a) a HCDR1, HCDR2, and/or HCDR3 from SEQ ID NO: 2033 (or a sequence with no more than 1, 2, 3, or 4 mutations, e.g., substitutions, additions, or deletions),
[1055] (b) a VH of SEQ ID NO: 2033 (or a sequence having at least about 75%, 80%, 85%, 90%, 95%, or 99% sequence identity thereto),
[1056] (c) a LCDR1, LCDR2, and/or LCDR3 from SEQ ID NO: 2034 (or a sequence with no more than 1, 2, 3, or 4 mutations, e.g., substitutions, additions, or deletions), and/or
[1057] (d) a VL of SEQ ID NO: 2034 (or a sequence having at least about 75%, 80%, 85%, 90%, 95%, or 99% sequence identity thereto).

[1058] In some embodiments, the first, second, or third tumor antigen is TM4SF1. In some embodiments, the first, second, or third tumor-targeting moiety comprises:
[1059] (i) a HCDR1, HCDR2, and/or HCDR3 from SEQ ID NO: 2035 (or a sequence with no more than 1, 2, 3, or 4 mutations, e.g., substitutions, additions, or deletions),
[1060] (ii) a VH of SEQ ID NO: 2035 (or a sequence having at least about 75%, 80%, 85%, 90%, 95%, or 99% sequence identity thereto),
[1061] (iii) a LCDR1, LCDR2, and/or LCDR3 from SEQ ID NO: 2036 (or a sequence with no more than 1, 2, 3, or 4 mutations, e.g., substitutions, additions, or deletions), and/or
[1062] (iv) a VL of SEQ ID NO: 2036 (or a sequence having at least about 75%, 80%, 85%, 90%, 95%, or 99% sequence identity thereto).

### Exemplary Anti-CD34 Antibody Sequences

[1063] In one aspect, provided herein is a multispecific or multifunctional molecule comprising a tumor targeting moiety that comprises a CD34-targeting moiety. In another aspect, provided herein is an anti-CD34 antibody molecule (e.g., a monoclonal anti-CD34 antibody molecule).

[1064] In some embodiments, the CD34-targeting moiety or anti-CD34 antibody molecule comprises an antibody, or an antigen-binding fragment thereof, disclosed in Table 20 or Table 21. In some embodiments, the CD34-targeting moiety or anti-CD34 antibody molecule comprises a CDR, a framework region, or a variable region sequence disclosed in Table 20 or Table 21 (or a sequence having at least about 75%, 80%, 85%, 90%, 95%, or 99% sequence identity thereto).

[1065] In some embodiments, the CD34-targeting moiety or anti-CD34 antibody molecule comprises a VH comprising a heavy chain complementarity determining region 1 (VHCDR1) amino acid sequence of SEQ ID NO: 6239 (or a sequence with no more than 1, 2, 3, or 4 mutations, e.g., substitutions, additions, or deletions), a VHCDR2 amino acid sequence of SEQ ID NO: 6241 (or a sequence with no more than 1, 2, 3, or 4 mutations, e.g., substitutions, additions, or deletions), and/or a VHCDR3 amino acid sequence of SEQ ID NO: 6243 (or a sequence with no more than 1, 2, 3, or 4 mutations, e.g., substitutions, additions, or deletions). In some embodiments, the CD34-targeting moiety or anti-CD34 antibody molecule comprises a VH comprising a VHCDR1 amino acid sequence of SEQ ID NO: 6239, a VHCDR2 amino acid sequence of SEQ ID NO: 6241, and/or a VHCDR3 amino acid sequence of SEQ ID NO: 6243. In some embodiments, the CD34-targeting moiety or anti-CD34 antibody molecule comprises a VL comprising a light chain complementarity determining region 1 (VLCDR1) amino acid sequence of SEQ ID NO: 6245 (or a sequence with no more than 1, 2, 3, or 4 mutations, e.g., substitutions, additions, or deletions), a VLCDR2 amino acid sequence of SEQ ID NO: 1236 (or a sequence with no more than 1, 2, 3, or 4 mutations, e.g., substitutions, additions, or deletions), and/or a VLCDR3 amino acid sequence of SEQ ID NO: 6246 (or a sequence with no more than 1, 2, 3, or 4 mutations, e.g., substitutions, additions, or deletions). In some embodiments, the CD34-targeting moiety or anti-CD34 antibody molecule comprises a VL comprising a VLCDR1 amino acid sequence of SEQ ID NO: 6245, a VLCDR2 amino acid sequence of SEQ ID NO: 1236, and a VLCDR3 amino acid sequence of SEQ ID NO: 6246.

[1066] In some embodiments, the CD34-targeting moiety or anti-CD34 antibody molecule comprises a VH comprising the amino acid sequence of SEQ ID NO: 79, 6225, 6227, or 6229, or an amino acid sequence having at least about 80%, 85%, 90%, 95%, or 99% sequence identity thereto. In some embodiments, the CD34-targeting moiety or anti-CD34 antibody molecule comprises a VL comprising the amino acid sequence of SEQ ID NO: 6231, 6233, 6235, or 6237, or an amino acid sequence having at least about 80%, 85%, 90%, 95%, or 99% sequence identity thereto. In some embodiments, the CD34-targeting moiety or anti-CD34 antibody molecule comprises a VH comprising the amino acid sequence of SEQ ID NO: 79 (or an amino acid sequence having at least about 80%, 85%, 90%, 95%, or 99% sequence identity thereto) and a VL comprising the amino acid sequence of SEQ ID NO: 6231 (or an amino acid sequence having at least about 80%, 85%, 90%, 95%, or 99% sequence identity thereto). In some embodiments, the CD34-targeting moiety or anti-CD34 antibody molecule comprises a VH comprising the amino acid sequence of SEQ ID NO: 79 and a VL comprising the amino acid sequence of SEQ ID NO: 6231. In some embodiments, the CD34-targeting moiety or anti-CD34 antibody molecule comprises a VH comprising the amino acid sequence of SEQ ID NO: 6225 (or an amino acid sequence having at least about 80%, 85%, 90%, 95%, or 99% sequence identity thereto) and a VL comprising the amino acid sequence of SEQ ID NO: 6231 (or an amino acid sequence having at least about 80%, 85%, 90%, 95%, or 99% sequence identity thereto). In some embodiments, the CD34-targeting moiety or anti-CD34 antibody molecule comprises a VH comprising the amino acid sequence of SEQ ID NO: 6225 and a VL comprising the amino acid sequence of SEQ ID NO: 6231. In some embodiments, the CD34-targeting moiety or anti-CD34 antibody molecule comprises a VH comprising the amino acid sequence of SEQ ID NO: 6227 (or an amino acid sequence having at least about 80%, 85%, 90%, 95%, or 99% sequence identity thereto) and a VL comprising the amino acid sequence of SEQ ID NO: 6231 (or an amino acid sequence having at least about 80%, 85%, 90%, 95%, or 99% sequence identity thereto). In some embodiments, the CD34-targeting moiety or anti-CD34 antibody molecule comprises a VH comprising the amino acid sequence of SEQ ID NO: 6227 and a VL comprising the amino acid sequence of SEQ ID NO: 6231. In some embodiments, the CD34-targeting moiety or anti-CD34 antibody molecule comprises a VH comprising the amino acid sequence of SEQ ID NO: 6229 (or an amino acid sequence having at least about 80%, 85%, 90%, 95%, or 99% sequence identity thereto) and a VL comprising the amino acid sequence of SEQ ID NO: 6231 (or an amino acid sequence having at least about 80%, 85%, 90%, 95%, or 99% sequence identity thereto). In some embodiments, the CD34-targeting moiety or anti-CD34 antibody molecule comprises a VH comprising the amino acid sequence of SEQ ID NO: 6229 and a VL comprising the amino acid sequence of SEQ ID NO: 6231. In some embodiments, the CD34-targeting moiety or anti-CD34 antibody molecule comprises a VH comprising the amino acid sequence of SEQ ID NO: 79 (or an amino acid sequence having at least about 80%, 85%, 90%, 95%, or 99% sequence identity thereto) and a VL comprising the amino acid sequence of SEQ ID NO: 6233 (or an amino acid sequence having at least about 80%, 85%, 90%, 95%, or 99% sequence identity thereto). In some embodiments, the CD34-targeting moiety or anti-CD34 antibody molecule comprises a VH comprising the amino acid sequence of SEQ ID NO: 79 and a VL comprising the amino acid sequence of SEQ ID NO: 6233. In some embodiments, the CD34-targeting moiety or anti-CD34 antibody molecule comprises a VH comprising the amino acid sequence of SEQ ID NO: 6225 (or an amino acid sequence having at least about 80%, 85%, 90%, 95%, or 99% sequence identity thereto) and a VL comprising the amino acid sequence of SEQ ID NO: 6233 (or an amino acid sequence having at least about 80%, 85%, 90%, 95%, or 99% sequence identity thereto). In some embodiments, the CD34-targeting moiety or anti-CD34 antibody molecule comprises a VH comprising the amino acid sequence of SEQ ID NO: 6225 and a VL comprising the amino acid sequence of SEQ ID NO: 6233. In some embodiments, the CD34-targeting moiety or anti-CD34 antibody molecule comprises a VH comprising the amino acid sequence of SEQ ID NO: 6227 (or an amino acid sequence having at least about 80%, 85%, 90%, 95%, or 99% sequence identity thereto) and a VL comprising the amino acid sequence of SEQ ID NO: 6233 (or an amino acid sequence having at least about 80%, 85%, 90%, 95%, or 99% sequence identity thereto). In some embodiments, the CD34-targeting moiety or anti-CD34 antibody molecule comprises a VH comprising the amino acid sequence of SEQ ID NO: 6227 and a VL comprising the amino acid sequence of SEQ ID NO: 6233. In some embodiments, the CD34-targeting moiety or anti-CD34 antibody molecule comprises a VH comprising the amino acid sequence of SEQ ID NO: 6229 (or an amino acid sequence having at least about 80%, 85%, 90%, 95%, or 99% sequence identity thereto) and a VL comprising the amino acid sequence of SEQ ID NO: 6233 (or an amino acid sequence having at least about 80%, 85%, 90%, 95%, or 99% sequence identity thereto). In some embodiments, the CD34-targeting moiety or anti-CD34 antibody molecule comprises a VH comprising the amino acid sequence of SEQ ID NO: 6229 and a VL comprising the amino acid sequence of SEQ ID NO: 6233. In some embodiments, the CD34-targeting moiety or anti-CD34 antibody molecule comprises a VH comprising the amino acid sequence of SEQ ID NO: 79 (or an amino acid sequence having at least about 80%, 85%, 90%, 95%, or 99% sequence identity thereto) and a VL comprising the amino acid sequence of SEQ ID NO: 6235 (or an amino acid sequence having at least about 80%, 85%, 90%, 95%, or 99% sequence identity thereto). In some embodiments, the CD34-targeting moiety or anti-CD34 antibody molecule comprises a VH comprising the amino acid sequence of SEQ ID NO: 79 and a VL comprising the amino acid sequence of SEQ ID NO: 6235. In some embodiments, the CD34-targeting moiety or anti-CD34 antibody molecule comprises a VH comprising the amino acid sequence of SEQ ID NO: 6225 (or an amino acid sequence having at least about 80%, 85%, 90%, 95%, or 99% sequence identity thereto) and a VL comprising the amino acid sequence of SEQ ID NO: 6235 (or an amino acid sequence having at least about 80%, 85%, 90%, 95%, or 99% sequence identity thereto). In some embodiments, the CD34-targeting moiety or anti-CD34 antibody molecule comprises a VH comprising the amino acid sequence of SEQ ID NO: 6225 and a VL comprising the amino acid sequence of SEQ ID NO: 6235. In some embodiments, the CD34-targeting moiety or anti-CD34 antibody molecule comprises a VH comprising the amino acid sequence of SEQ ID NO: 6227 (or an amino acid sequence having at least about 80%, 85%, 90%, 95%, or 99% sequence identity thereto) and a VL comprising the amino acid sequence of SEQ ID NO: 6235 (or an amino acid sequence having at least about 80%, 85%, 90%, 95%, or 99% sequence identity thereto). In some embodiments, the CD34-targeting moiety or anti-CD34 antibody molecule comprises a VH comprising the amino acid sequence of SEQ ID NO: 6227 and a VL comprising the amino acid sequence of SEQ ID NO: 6235. In some embodiments, the CD34-targeting moiety or anti-CD34 antibody molecule comprises a VH comprising the amino acid sequence of SEQ ID NO: 6229 (or an amino acid sequence having at least about 80%, 85%, 90%, 95%, or 99% sequence identity thereto) and a VL comprising the amino acid sequence of SEQ ID NO: 6235 (or an amino acid sequence having at least about 80%, 85%, 90%, 95%, or 99% sequence identity thereto). In some embodiments, the CD34-targeting moiety or anti-CD34 antibody molecule comprises a VH comprising the amino acid sequence of SEQ ID NO: 6229 and a VL comprising the amino acid sequence of SEQ ID NO: 6235. In some embodiments, the CD34-targeting moiety or anti-CD34 antibody molecule comprises a VH comprising the amino acid sequence of SEQ ID NO: 79 (or an amino acid sequence having at least about 80%, 85%, 90%, 95%, or 99% sequence identity thereto) and a VL comprising the amino acid sequence of SEQ ID NO: 6237 (or an amino acid sequence having at least about 80%, 85%, 90%, 95%, or 99% sequence identity thereto). In some embodiments, the CD34-targeting moiety or anti-CD34 antibody molecule comprises a VH comprising the amino acid sequence of SEQ ID NO: 79 and a VL comprising the amino acid sequence of SEQ ID NO: 6237. In some embodiments, the CD34-targeting moiety or anti-CD34 antibody molecule comprises a VH comprising the amino acid sequence of SEQ ID NO: 6225 (or an amino acid sequence having at least about 80%, 85%, 90%, 95%, or 99% sequence identity thereto) and a VL comprising the amino acid sequence of SEQ ID NO: 6237 (or an amino acid sequence having at least about 80%, 85%, 90%, 95%, or 99% sequence identity thereto). In some embodiments, the CD34-targeting moiety or anti-CD34 antibody molecule comprises a VH comprising the amino acid sequence of SEQ ID NO: 6225 and a VL comprising the amino acid sequence of SEQ ID NO: 6237. In some embodiments, the CD34-targeting moiety or anti-CD34 antibody molecule comprises a VH comprising the amino acid sequence of SEQ ID NO: 6227 (or an amino acid sequence having at least about 80%, 85%, 90%, 95%, or 99% sequence identity thereto) and a VL comprising the amino acid sequence of SEQ ID NO: 6237 (or an amino acid sequence having at least about 80%, 85%, 90%, 95%, or 99% sequence identity thereto). In some embodiments, the CD34-targeting moiety or anti-CD34 antibody molecule comprises a VH comprising the amino acid sequence of SEQ ID NO: 6227 and a VL comprising the amino acid sequence of SEQ ID NO: 6237. In some embodiments, the CD34-targeting moiety or anti-CD34 antibody molecule comprises a VH comprising the amino acid sequence of SEQ ID NO: 6229 (or an amino acid sequence having at least about 80%, 85%, 90%, 95%, or 99% sequence identity thereto) and a VL comprising the amino acid sequence of SEQ ID NO: 6237 (or an amino acid sequence having at least about 80%, 85%, 90%, 95%, or 99% sequence identity thereto). In some embodiments, the CD34-targeting moiety or anti-CD34 antibody molecule comprises a VH comprising the amino acid sequence of SEQ ID NO: 6229 and a VL comprising the amino acid sequence of SEQ ID NO: 6237.

[1067] In some embodiments, the CD34-targeting moiety or anti-CD34 antibody molecule comprises a VH comprising the amino acid sequence of SEQ ID NO: 79 and a VL comprising the amino acid sequence of SEQ ID NO: 6233.

TABLE 20
Exemplary variable region sequences of anti-CD34 antibodies

| SEQ ID | | |
|---|---|---|
| NO | Description | Sequence |
| SEQ ID | Mouse VH | EIQLQQSGPELMKPGASLKISCKTSGYSFTSYYMHWVKQSHGQ |
| NO: 6222 | | SLEWIGFIDPFKVITGYNHNFRGKATLTVDRSSTTAYMHLRSLT |
| | | SEDSAVYYCARRYYSDYDGYALDYWGQGTSVTVSS |
| SEQ ID | Mouse VL | DVVMTQTPLSLPVSLGDQASIFCRSSQSLVHSDGNTYLHWYLQ |
| NO: 6223 | | KPGQSPKLLIYKVSNRFSGVPDRFSGSGSGTDFTLKISRVEAEDL |
| | | GVYFCSQSTHVPPYTFGGGTKLEIK |
| SEQ ID | Humanization | QIQLQESGPGLVKPSETLSLTCTTSGYSFTSYYMHWIRQPPGKG |
| NO: 79 | variant VH1 | LEWIGFIDPFKVITGYNHNFRGRVTISVDRSKTQASLKLSSVTAA |
| | | DTAVYYCARRYYSDYDGYALDYWGQGTLVTVSS |
| SEQ ID | Humanization | EIQLVQSGAEVKKPGATVKISCKTSGYSFTSYYMHWVQQAPGK |
| NO: 6225 | variant VH2 | GLEWMGFIDPFKVITGYNHNFRGRVTITVDRSTTTAYMELSSLR |
| | | SEDTAVYYCARRYYSDYDGYALDYWGQGTLVTVSS |
| SEQ ID | Humanization | QIQLVQSGAEVKKTGSSVKVSCKTSGYSFTSYYMHWVRQAPG |
| NO: 6227 | variant VH3 | QALEWMGFIDPFKVITGYNHNFRGRVTITVDRSMTTAYMELSS |
| | | LRSEDTAMYYCARRYYSDYDGYALDYWGQGTLVTVSS |
| SEQ ID | Humanization | QIQLVQSGAEVKKPGASVKVSCKTSGYSFTSYYMHWVRQAPG |
| NO: 6229 | variant VH4 | QGLEWMGFIDPFKVITGYNHNFRGRVTSTVDRSITTAYMELSRL |
| | | RSDDTVVYYCARRYYSDYDGYALDYWGQGTLVTVSS |
| SEQ ID | Humanization | EVVMTQSPGTLSLSPGERATLSCRSSQSLVHSDGNTYLHWYQQ |
| NO: 6231 | variant VL1 | KPGQAPRLLIYKVSNRFSGIPDRFSGSGSGTDFTLTISRLEPEDFA |
| | | VYFCSQSTHVPPYTFGGGTKVEIK |
| SEQ ID | Humanization | EVVMTQSPATLSLSPGERATLSCRSSQSLVHSDGNTYLHWYQQ |
| NO: 6233 | variant VL2 | KPGQAPRLLIYKVSNRFSGIPARFSGSGSGTDFTLTISSLEPEDFA |
| | | VYFCSQSTHVPPYTFGGGTKVEIK |
| SEQ ID | Humanization | EVVMTQSPATLSVSPGERATLSCRSSQSLVHSDGNTYLHWYQQ |
| NO: 6235 | variant VL3 | KPGQAPRLLIYKVSNRFSGIPARFSGSGSGTEFTLTISSLQSEDFA |
| | | VYFCSQSTHVPPYTFGGGTKVEIK |
| SEQ ID | Humanization | VVWMTQSPSLLSASTGDRVTISCRSSQSLVHSDGNTYLHWYQQ |
| NO: 6237 | variant VL4 | KPGKAPELLIYKVSNRFSGVPSRFSGSGSGTDFTLTISCLQSEDF |
| | | ATYFCSQSTHVPPYTFGGGTKVEIK |

TABLE 21
Exemplary CDRs of anti-CD34 antibodies

| SEQ ID NO | Description | Sequence |
|---|---|---|
| SEQ ID NO: 6239 | VH CDR1 | FTSYYMH |
| SEQ ID NO: 6241 | VH CDR2 | FIDPFKVITGYNHNFRG |
| SEQ ID NO: 6243 | VH CDR3 | RYYSDYDGYALDY |
| SEQ ID NO: 6245 | VL CDR1 | RSSQSLVHSDGNTYLH |
| SEQ ID NO: 1236 | VL CDR2 | KVSNRFS |
| SEQ ID NO: 6246 | VL CDR3 | SQSTHVPPYT |

### Linkers

[1068] The multispecific or multifunctional molecule disclosed herein can further include a linker, e.g., a linker between one or more of: the antigen binding domain and the cytokine molecule, the antigen binding domain and the immune cell engager, the antigen binding domain and the stromal modifying moiety, the cytokine molecule and the immune cell engager, the cytokine molecule and the stromal modifying moiety, the immune cell engager and the stromal modifying moiety, the antigen binding domain and the immunoglobulin chain constant region, the cytokine molecule and the immunoglobulin chain constant region, the immune cell engager and the immunoglobulin chain constant region, or the stromal modifying moiety and the immunoglobulin chain constant region. In some embodiments, the linker is chosen from: a cleavable linker, a non-cleavable linker, a peptide linker, a flexible linker, a rigid linker, a helical linker, or a non-helical linker, or a combination thereof.

[1069] In one embodiment, the multispecific molecule can include one, two, three or four linkers, e.g., a peptide linker. In one embodiment, the peptide linker includes Gly and Ser. In some embodiments, the peptide linker is selected from GGGGS (SEQ ID NO: 6214); GGGGSGGGGS (SEQ ID NO: 6215); GGGGSGGGGSGGGGS (SEQ ID NO: 6216); and DVPSGPGGGGGSGGGGS (SEQ ID NO: 6217). In some embodiments, the peptide linker is a A(EAAAK)nA (SEQ ID NO: 6413) family of linkers (e.g., as described in Protein Eng. (2001) 14 (8): 529-532). These are stiff helical linkers with n ranging from 2-5. In some embodiments, the peptide linker is selected from AEAAAKEAAAKAAA (SEQ ID NO: 6220); AEAAAKEAAAKEAAAKAAA (SEQ ID NO: 6221); AEAAAKEAAAKEAAAKEAAAKAAA (SEQ ID NO: 77); and AEAAAKEAAAKEAAAKEAAAKEAAAKAAA(SEQ ID NO: 78).

### Nucleic Acids

[1070] Nucleic acids encoding the aforementioned multispecific or multifunctional molecules are also disclosed.

[1071] In certain embodiments, the invention features nucleic acids comprising nucleotide sequences that encode heavy and light chain variable regions and CDRs or hypervariable loops of the antibody molecules, as described herein. For example, the invention features a first and second nucleic acid encoding heavy and light chain variable regions, respectively, of an antibody molecule chosen from one or more of the antibody molecules disclosed herein. The nucleic acid can comprise a nucleotide sequence as set forth in the tables herein, or a sequence substantially identical thereto (e.g., a sequence at least about 85%, 90%, 95%, 99% or more identical thereto, or which differs by no more than 3, 6, 15, 30, or 45 nucleotides from the sequences shown in the tables herein.

[1072] In certain embodiments, the nucleic acid can comprise a nucleotide sequence encoding at least one, two, or three CDRs or hypervariable loops from a heavy chain variable region having an amino acid sequence as set forth in the tables herein, or a sequence substantially homologous thereto (e.g., a sequence at least about 85%, 90%, 95%, 99% or more identical thereto, and/or having one or more substitutions, e.g., conserved substitutions). In other embodiments, the nucleic acid can comprise a nucleotide sequence encoding at least one, two, or three CDRs or hypervariable loops from a light chain variable region having an amino acid sequence as set forth in the tables herein, or a sequence substantially homologous thereto (e.g., a sequence at least about 85%, 90%, 95%, 99% or more identical thereto, and/or having one or more substitutions, e.g., conserved substitutions). In yet another embodiment, the nucleic acid can comprise a nucleotide sequence encoding at least one, two, three, four, five, or six CDRs or hypervariable loops from heavy and light chain variable regions having an amino acid sequence as set forth in the tables herein, or a sequence substantially homologous thereto (e.g., a sequence at least about 85%, 90%, 95%, 99% or more identical thereto, and/or having one or more substitutions, e.g., conserved substitutions).

[1073] In certain embodiments, the nucleic acid can comprise a nucleotide sequence encoding at least one, two, or three CDRs or hypervariable loops from a heavy chain variable region having the nucleotide sequence as set forth in the tables herein, a sequence substantially homologous thereto (e.g., a sequence at least about 85%, 90%, 95%, 99% or more identical thereto, and/or capable of hybridizing under the stringency conditions described herein). In another embodiment, the nucleic acid can comprise a nucleotide sequence encoding at least one, two, or three CDRs or hypervariable loops from a light chain variable region having the nucleotide sequence as set forth in the tables herein, or a sequence substantially homologous thereto (e.g., a sequence at least about 85%, 90%, 95%, 99% or more identical thereto, and/or capable of hybridizing under the stringency conditions described herein). In yet another embodiment, the nucleic acid can comprise a nucleotide sequence encoding at least one, two, three, four, five, or six CDRs or hypervariable loops from heavy and light chain variable regions having the nucleotide sequence as set forth in the tables herein, or a sequence substantially homologous thereto (e.g., a sequence at least about 85%, 90%, 95%, 99% or more identical thereto, and/or capable of hybridizing under the stringency conditions described herein).

[1074] In certain embodiments, the nucleic acid can comprise a nucleotide sequence encoding a cytokine molecule, an immune cell engager, or a stromal modifying moiety disclosed herein.

[1075] In another aspect, the application features host cells and vectors containing the nucleic acids described herein. The nucleic acids may be present in a single vector or separate vectors present in the same host cell or separate host cell, as described in more detail hereinbelow.

### Vectors

[1076] Further provided herein are vectors comprising the nucleotide sequences encoding a multispecific or multifunctional molecule described herein. In one embodiment, the vectors comprise nucleotides encoding a multispecific or multifunctional molecule described herein. In one embodiment, the vectors comprise the nucleotide sequences described herein. The vectors include, but are not limited to, a virus, plasmid, cosmid, lambda phage or a yeast artificial chromosome (YAC).

[1077] Numerous vector systems can be employed. For example, one class of vectors utilizes DNA elements which are derived from animal viruses such as, for example, bovine papilloma virus, polyoma virus, adenovirus, vaccinia virus, baculovirus, retroviruses (Rous Sarcoma Virus, MMTV or MOMLV) or SV40 virus. Another class of vectors utilizes RNA elements derived from RNA viruses such as Semliki Forest virus, Eastern Equine Encephalitis virus and Flaviviruses.

[1078] Additionally, cells which have stably integrated the DNA into their chromosomes may be selected by introducing one or more markers which allow for the selection of transfected host cells. The marker may provide, for example, prototropy to an auxotrophic host, biocide resistance (e.g., antibiotics), or resistance to heavy metals such as copper, or the like. The selectable marker gene can be either directly linked to the DNA sequences to be expressed, or introduced into the same cell by cotransformation. Additional elements may also be needed for optimal synthesis of mRNA. These elements may include splice signals, as well as transcriptional promoters, enhancers, and termination signals.

[1079] Once the expression vector or DNA sequence containing the constructs has been prepared for expression, the expression vectors may be transfected or introduced into an appropriate host cell. Various techniques may be employed to achieve this, such as, for example, protoplast fusion, calcium phosphate precipitation, electroporation, retroviral transduction, viral transfection, gene gun, lipid based transfection or other conventional techniques. In the case of protoplast fusion, the cells are grown in media and screened for the appropriate activity. Methods and conditions for culturing the resulting transfected cells and for recovering the antibody molecule produced are known to those skilled in the art, and may be varied or optimized depending upon the specific expression vector and mammalian host cell employed, based upon the present description.

### Cells

[1080] In another aspect, the application features host cells and vectors containing the nucleic acids described herein. The nucleic acids may be present in a single vector or separate vectors present in the same host cell or separate host cell. The host cell can be a eukaryotic cell, e.g., a mammalian cell, an insect cell, a yeast cell, or a prokaryotic cell, e.g., E. coli. For example, the mammalian cell can be a cultured cell or a cell line. Exemplary mammalian cells include lymphocytic cell lines (e.g., NSO), Chinese hamster ovary cells (CHO), COS cells, oocyte cells, and cells from a transgenic animal, e.g., mammary epithelial cell.

[1081] The invention also provides host cells comprising a nucleic acid encoding an antibody molecule as described herein.

[1082] In one embodiment, the host cells are genetically engineered to comprise nucleic acids encoding the antibody molecule.

[1083] In one embodiment, the host cells are genetically engineered by using an expression cassette. The phrase “expression cassette,” refers to nucleotide sequences, which are capable of affecting expression of a gene in hosts compatible with such sequences. Such cassettes may include a promoter, an open reading frame with or without introns, and a termination signal. Additional factors necessary or helpful in effecting expression may also be used, such as, for example, an inducible promoter.

[1084] The invention also provides host cells comprising the vectors described herein.

[1085] The cell can be, but is not limited to, a eukaryotic cell, a bacterial cell, an insect cell, or a human cell. Suitable eukaryotic cells include, but are not limited to, Vero cells, HeLa cells, COS cells, CHO cells, HEK293 cells, BHK cells and MDCKII cells. Suitable insect cells include, but are not limited to, Sf9 cells.

### Uses and Combination Therapies

[1086] Methods described herein include treating a cancer in a subject by using a multispecific or multifunctional molecule described herein, e.g., using a pharmaceutical composition described herein. Also provided are methods for reducing or ameliorating a symptom of a cancer in a subject, as well as methods for inhibiting the growth of a cancer and/or killing one or more cancer cells. In some embodiments, the methods described herein decrease the size of a tumor and/or decrease the number of cancer cells in a subject administered with a described herein or a pharmaceutical composition described herein.

[1087] In some embodiments, the cancer is a hematological cancer. In some embodiments, the hematological cancer is a leukemia or a lymphoma. As used herein, a “hematologic cancer” refers to a tumor of the hematopoietic or lymphoid tissues, e.g., a tumor that affects blood, bone marrow, or lymph nodes. Exemplary hematologic malignancies include, but are not limited to, leukemia (e.g., acute lymphoblastic leukemia (ALL), acute myeloid leukemia (AML), chronic lymphocytic leukemia (CLL), chronic myelogenous leukemia (CML), hairy cell leukemia, acute monocytic leukemia (AMoL), chronic myelomonocytic leukemia (CMML), juvenile myelomonocytic leukemia (JMML), or large granular lymphocytic leukemia), lymphoma (e.g., AIDS-related lymphoma, cutaneous T-cell lymphoma, Hodgkin lymphoma (e.g., classical Hodgkin lymphoma or nodular lymphocyte-predominant Hodgkin lymphoma), mycosis fungoides, non-Hodgkin lymphoma (e.g., B-cell non-Hodgkin lymphoma (e.g., Burkitt lymphoma, small lymphocytic lymphoma (CLL/SLL), diffuse large B-cell lymphoma, follicular lymphoma, immunoblastic large cell lymphoma, precursor B-lymphoblastic lymphoma, or mantle cell lymphoma) or T-cell non-Hodgkin lymphoma (mycosis fungoides, anaplastic large cell lymphoma, or precursor T-lymphoblastic lymphoma)), primary central nervous system lymphoma, Sézary syndrome, Waldenstrom macroglobulinemia), chronic myeloproliferative neoplasm, Langerhans cell histiocytosis, multiple myeloma/plasma cell neoplasm, myelodysplastic syndrome, or myelodysplastic/myeloproliferative neoplasm.

[1088] In some embodiments, the cancer is a myeloproliferative neoplasm, e.g., primary or idiopathic myelofibrosis (MF), essential thrombocytosis (ET), polycythemia vera (PV), or chronic myelogenous leukemia (CML). In some embodiments, the cancer is myelofibrosis. In some embodiments, the subject has myelofibrosis. In some embodiments, the subject has a calreticulin mutation, e.g., a calreticulin mutation disclosed herein. In some embodiments, the subject does not have the JAK2-V617F mutation. In some embodiments, the subject has the JAK2-V617F mutation. In some embodiments, the subject has a MPL mutation. In some embodiments, the subject does not have a MPL mutation.

[1089] In some embodiments, the cancer is a solid cancer. Exemplary solid cancers include, but are not limited to, ovarian cancer, rectal cancer, stomach cancer, testicular cancer, cancer of the anal region, uterine cancer, colon cancer, rectal cancer, renal-cell carcinoma, liver cancer, non-small cell carcinoma of the lung, cancer of the small intestine, cancer of the esophagus, melanoma, Kaposi's sarcoma, cancer of the endocrine system, cancer of the thyroid gland, cancer of the parathyroid gland, cancer of the adrenal gland, bone cancer, pancreatic cancer, skin cancer, cancer of the head or neck, cutaneous or intraocular malignant melanoma, uterine cancer, brain stem glioma, pituitary adenoma, epidermoid cancer, carcinoma of the cervix squamous cell cancer, carcinoma of the fallopian tubes, carcinoma of the endometrium, carcinoma of the vagina, sarcoma of soft tissue, cancer of the urethra, carcinoma of the vulva, cancer of the penis, cancer of the bladder, cancer of the kidney or ureter, carcinoma of the renal pelvis, spinal axis tumor, neoplasm of the central nervous system (CNS), primary CNS lymphoma, tumor angiogenesis, metastatic lesions of said cancers, or combinations thereof.

[1090] In some embodiments, the multispecific or multifunctional molecules (or pharmaceutical composition) are administered in a manner appropriate to the disease to be treated or prevented. The quantity and frequency of administration will be determined by such factors as the condition of the patient, and the type and severity of the patient's disease. Appropriate dosages may be determined by clinical trials. For example, when “an effective amount” or “a therapeutic amount” is indicated, the precise amount of the pharmaceutical composition (or multispecific or multifunctional molecules) to be administered can be determined by a physician with consideration of individual differences in tumor size, extent of infection or metastasis, age, weight, and condition of the subject. In some embodiments, the pharmaceutical composition described herein can be administered at a dosage of 10⁴ to 10⁹ cells/kg body weight, e.g., 10⁵ to 10⁶ cells/kg body weight, including all integer values within those ranges. In some embodiments, the pharmaceutical composition described herein can be administered multiple times at these dosages. In some embodiments, the pharmaceutical composition described herein can be administered using infusion techniques described in immunotherapy (see, e.g., Rosenberg et al., New Eng. J. of Med. 319:1676, 1988).

[1091] In some embodiments, the multispecific or multifunctional molecules or pharmaceutical composition is administered to the subject parenterally. In some embodiments, the cells are administered to the subject intravenously, subcutaneously, intratumorally, intranodally, intramuscularly, intradermally, or intraperitoneally. In some embodiments, the cells are administered, e.g., injected, directly into a tumor or lymph node. In some embodiments, the cells are administered as an infusion (e.g., as described in Rosenberg et al., New Eng. J. of Med. 319:1676, 1988) or an intravenous push. In some embodiments, the cells are administered as an injectable depot formulation.

[1092] In some embodiments, the subject is a mammal. In some embodiments, the subject is a human, monkey, pig, dog, cat, cow, sheep, goat, rabbit, rat, or mouse. In embodiments, the subject is a human. In some embodiments, the subject is a pediatric subject, e.g., less than 18 years of age, e.g., less than 17, 16, 15, 14, 13, 12, 11, 10, 9, 8, 7, 6, 5, 4, 3, 2, 1 or less years of age. In some embodiments, the subject is an adult, e.g., at least 18 years of age, e.g., at least 19, 20, 21, 22, 23, 24, 25, 25-30, 30-35, 35-40, 40-50, 50-60, 60-70, 70-80, or 80-90 years of age.

### Combination Therapies

[1093] The multispecific or multifunctional molecules disclosed herein can be used in combination with a second therapeutic agent or procedure.

[1094] In some embodiments, the multispecific or multifunctional molecule and the second therapeutic agent or procedure are administered/performed after a subject has been diagnosed with a cancer, e.g., before the cancer has been eliminated from the subject. In some embodiments, the multispecific or multifunctional molecule and the second therapeutic agent or procedure are administered/performed simultaneously or concurrently. For example, the delivery of one treatment is still occurring when the delivery of the second commences, e.g., there is an overlap in administration of the treatments. In other embodiments, the multispecific or multifunctional molecule and the second therapeutic agent or procedure are administered/performed sequentially. For example, the delivery of one treatment ceases before the delivery of the other treatment begins.

[1095] In some embodiments, combination therapy can lead to more effective treatment than monotherapy with either agent alone. In some embodiments, the combination of the first and second treatment is more effective (e.g., leads to a greater reduction in symptoms and/or cancer cells) than the first or second treatment alone. In some embodiments, the combination therapy permits use of a lower dose of the first or the second treatment compared to the dose of the first or second treatment normally required to achieve similar effects when administered as a monotherapy. In some embodiments, the combination therapy has a partially additive effect, wholly additive effect, or greater than additive effect.

[1096] In one embodiment, the multispecific or multifunctional molecule is administered in combination with a therapy, e.g., a cancer therapy (e.g., one or more of anti-cancer agents, immunotherapy, photodynamic therapy (PDT), surgery and/or radiation). The terms “chemotherapeutic,” “chemotherapeutic agent,” and “anti-cancer agent” are used interchangeably herein. The administration of the multispecific or multifunctional molecule and the therapy, e.g., the cancer therapy, can be sequential (with or without overlap) or simultaneous. Administration of the multispecific or multifunctional molecule can be continuous or intermittent during the course of therapy (e.g., cancer therapy). Certain therapies described herein can be used to treat cancers and non-cancerous diseases. For example, PDT efficacy can be enhanced in cancerous and non-cancerous conditions (e.g., tuberculosis) using the methods and compositions described herein (reviewed in, e.g., Agostinis, P. et al. (2011) CA Cancer J. Clin. 61:250-281).

### Anti-Cancer Therapies

[1097] In other embodiments, the multispecific or multifunctional molecule is administered in combination with a low or small molecular weight chemotherapeutic agent. Exemplary low or small molecular weight chemotherapeutic agents include, but not limited to, 13-cis-retinoic acid (isotretinoin, ACCUTANE®), 2-CdA (2-chlorodeoxyadenosine, cladribine, LEUSTATIN™), 5-azacitidine (azacitidine, VIDAZA®), 5-fluorouracil (5-FU, fluorouracil, ADRUCIL®), 6-mercaptopurine (6-MP, mercaptopurine, PURINETHOL®), 6-TG (6-thioguanine, thioguanine, THIOGUANINE TABLOID®), abraxane (paclitaxel protein-bound), actinomycin-D (dactinomycin, COSMEGEN®), alitretinoin (PANRETIN®), all-transretinoic acid (ATRA, tretinoin, VESANOID®), altretamine (hexamethylmelamine, HMM, HEXALEN®), amethopterin (methotrexate, methotrexate sodium, MTX, TREXALL™ RHEUMATREX®), amifostine (ETHYOL®), arabinosylcytosine (Ara-C, cytarabine, CYTOSAR-U®), arsenic trioxide (TRISENOX®), asparaginase (Erwinia L-asparaginase, L-asparaginase, ELSPAR®, KIDROLASE®), BCNU (carmustine, BiCNUo), bendamustine (TREANDA®), bexarotene (TARGRETIN®), bleomycin (BLENOXANE®), busulfan (BUSULFEX®, MYLERAN®), calcium leucovorin (Citrovorum Factor, folinic acid, leucovorin), camptothecin-11 (CPT-11, irinotecan, CAMPTOSAR®), capecitabine (XELODA®), carboplatin (PARAPLATIN®), carmustine wafer (prolifeprospan 20 with carmustine implant, GLIADEL® wafer), CCI-779 (temsirolimus, TORISEL®), CCNU (lomustine, CeeNU), CDDP (cisplatin, PLATINOL®, PLATINOL-AQ®), chlorambucil (leukeran), cyclophosphamide (CYTOXAN®, NEOSAR®), dacarbazine (DIC, DTIC, imidazole carboxamide, DTIC-DOME®), daunomycin (daunorubicin, daunorubicin hydrochloride, rubidomycin hydrochloride, CERUBIDINE®), decitabine (DACOGEN®), dexrazoxane (ZINECARD®), DHAD (mitoxantrone, NOVANTRONE®), docetaxel (TAXOTERE®), doxorubicin (ADRIAMYCIN®, RUBEX®), epirubicin (ELLENCE™), estramustine (EMCYT®), etoposide (VP-16, etoposide phosphate, TOPOSAR®, VEPESID®, ETOPOPHOS®), floxuridine (FUDR®), fludarabine (FLUDARA®), fluorouracil (cream) (CARAC™, EFUDEX®, FLUOROPLEX®), gemcitabine (GEMZAR®), hydroxyurea (HYDREA®, DROXIA™, MYLOCEL™), idarubicin (IDAMYCIN®), ifosfamide (IFEX®), ixabepilone (IXEMPRA™), LCR (leurocristine, vincristine, VCR, ONCOVIN®, VINCASAR PFS®), L-PAM (L-sarcolysin, melphalan, phenylalanine mustard, ALKERAN®), mechlorethamine (mechlorethamine hydrochloride, mustine, nitrogen mustard, MUSTARGEN®), mesna (MESNEX™) mitomycin (mitomycin-C, MTC, MUTAMYCIN®), nelarabine (ARRANON®), oxaliplatin (ELOXATIN™), paclitaxel (TAXOL®, ONXAL™), pegaspargase (PEG-L-asparaginase, ONCOSPAR®), PEMETREXED (ALIMTA®), pentostatin (NIPENT®), procarbazine (MATULANE®), streptozocin (ZANOSAR®), temozolomide (TEMODAR®), teniposide (VM-26, VUMON®), TESPA (thiophosphoamide, thiotepa, TSPA, THIOPLEX®), topotecan (HYCAMTIN®), vinblastine (vinblastine sulfate, vincaleukoblastine, VLB, ALKABAN-AQ®, VELBAN®), vinorelbine (vinorelbine tartrate, NAVELBINE®), and vorinostat (ZOLINZA®).

[1098] In another embodiment, the multispecific or multifunctional molecule is administered in conjunction with a biologic. Biologics useful in the treatment of cancers are known in the art and a binding molecule of the invention may be administered, for example, in conjunction with such known biologics. For example, the FDA has approved the following biologics for the treatment of breast cancer: HERCEPTIN® (trastuzumab, Genentech Inc., South San Francisco, Calif.; a humanized monoclonal antibody that has anti-tumor activity in HER2-positive breast cancer); FASLODEX® (fulvestrant, AstraZeneca Pharmaceuticals, LP, Wilmington, Del.; an estrogen-receptor antagonist used to treat breast cancer); ARIMIDEX® (anastrozole, AstraZeneca Pharmaceuticals, LP; a nonsteroidal aromatase inhibitor which blocks aromatase, an enzyme needed to make estrogen); Aromasin® (exemestane, Pfizer Inc., New York, N.Y.; an irreversible, steroidal aromatase inactivator used in the treatment of breast cancer); FEMARA® (letrozole, Novartis Pharmaceuticals, East Hanover, N.J.; a nonsteroidal aromatase inhibitor approved by the FDA to treat breast cancer); and NOLVADEX® (tamoxifen, AstraZeneca Pharmaceuticals, LP; a nonsteroidal antiestrogen approved by the FDA to treat breast cancer). Other biologics with which the binding molecules of the invention may be combined include: AVASTIN® (bevacizumab, Genentech Inc.; the first FDA-approved therapy designed to inhibit angiogenesis); and ZEVALIN® (ibritumomab tiuxetan, Biogen Idec, Cambridge, Mass.; a radiolabeled monoclonal antibody currently approved for the treatment of B-cell lymphomas).

[1099] In addition, the FDA has approved the following biologics for the treatment of colorectal cancer: AVASTIN®; ERBITUX® (cetuximab, ImClone Systems Inc., New York, N.Y., and Bristol-Myers Squibb, New York, N.Y.; is a monoclonal antibody directed against the epidermal growth factor receptor (EGFR)); GLEEVEC® (imatinib mesylate; a protein kinase inhibitor); and ERGAMISOL® (levamisole hydrochloride, Janssen Pharmaceutica Products, LP, Titusville, N.J.; an immunomodulator approved by the FDA in 1990 as an adjuvant treatment in combination with 5-fluorouracil after surgical resection in patients with Dukes' Stage C colon cancer).

[1100] For the treatment of lung cancer, exemplary biologics include TARCEVA® (erlotinib HCL, OSI Pharmaceuticals Inc., Melville, N.Y.; a small molecule designed to target the human epidermal growth factor receptor 1 (HER1) pathway).

[1101] For the treatment of multiple myeloma, exemplary biologics include VELCADE® Velcade (bortezomib, Millennium Pharmaceuticals, Cambridge Mass.; a proteasome inhibitor). Additional biologics include THALIDOMID® (thalidomide, Clegene Corporation, Warren, N.J.; an immunomodulatory agent and appears to have multiple actions, including the ability to inhibit the growth and survival of myeloma cells and anti-angiogenesis).

[1102] Additional exemplary cancer therapeutic antibodies include, but are not limited to, 3F8, abagovomab, adecatumumab, afutuzumab, alacizumab pegol, alemtuzumab (CAMPATH®, MABCAMPATH®), altumomab pentetate (HYBRI-CEAKER®), anatumomab mafenatox, anrukinzumab (IMA-638), apolizumab, arcitumomab (CEA-SCAN®), bavituximab, bectumomab (LYMPHOSCAN®), belimumab (BENLYSTA®, LYMPHOSTAT-B®), besilesomab (SCINTIMUN®), bevacizumab (AVASTIN®), bivatuzumab mertansine, blinatumomab, brentuximab vedotin, cantuzumab mertansine, capromab pendetide (PROSTASCINT®), catumaxomab (REMOVAB®), CC49, cetuximab (C225, ERBITUX®), citatuzumab bogatox, cixutumumab, clivatuzumab tetraxetan, conatumumab, dacetuzumab, denosumab (PROLIA®), detumomab, ecromeximab, edrecolomab (PANOREX®), elotuzumab, epitumomab cituxetan, epratuzumab, ertumaxomab (REXOMUN®), etaracizumab, farletuzumab, figitumumab, fresolimumab, galiximab, gemtuzumab ozogamicin (MYLOTARG®), girentuximab, glembatumumab vedotin, ibritumomab (ibritumomab tiuxetan, ZEVALIN®), igovomab (INDIMACIS-125®), intetumumab, inotuzumab ozogamicin, ipilimumab, iratumumab, labetuzumab (CEA-CIDE®), lexatumumab, lintuzumab, lucatumumab, lumiliximab, mapatumumab, matuzumab, milatuzumab, minretumomab, mitumomab, nacolomab tafenatox, naptumomab estafenatox, necitumumab, nimotuzumab (THERACIM®, THERALOC®), nofetumomab merpentan (VERLUMA®), ofatumumab (ARZERRA®), olaratumab, oportuzumab monatox, oregovomab (OVAREX®), panitumumab (VECTIBIX®), pemtumomab (THERAGYN®), pertuzumab (OMNITARG®), pintumomab, pritumumab, ramucirumab, ranibizumab (LUCENTIS®), rilotumumab, rituximab (MABTHERA®, RITUXAN®), robatumumab, satumomab pendetide, sibrotuzumab, siltuximab, sontuzumab, tacatuzumab tetraxetan (AFP-CIDE®), taplitumomab paptox, tenatumomab, TGN1412, ticilimumab (tremelimumab), tigatuzumab, TNX-650, tositumomab (BEXXAR®), trastuzumab (HERCEPTIN®), tremelimumab, tucotuzumab celmoleukin, veltuzumab, volociximab, votumumab (HUMASPECT®), zalutumumab (HUMAX-EGFR®), and zanolimumab (HUMAX-CD4®).

[1103] In other embodiments, the multispecific or multifunctional molecule is administered in combination with a viral cancer therapeutic agent. Exemplary viral cancer therapeutic agents include, but not limited to, vaccinia virus (vvDD-CDSR), carcinoembryonic antigen-expressing measles virus, recombinant vaccinia virus (TK-deletion plus GM-CSF), Seneca Valley virus-001, Newcastle virus, coxsackie virus A21, GL-ONC1, EBNA1 C-terminal/LMP2 chimeric protein-expressing recombinant modified vaccinia Ankara vaccine, carcinoembryonic antigen-expressing measles virus, G207 oncolytic virus, modified vaccinia virus Ankara vaccine expressing p53, OncoVEX GM-CSF modified herpes-simplex 1 virus, fowlpox virus vaccine vector, recombinant vaccinia prostate-specific antigen vaccine, human papillomavirus 16/18 L1 virus-like particle/AS04 vaccine, MVA-EBNA1/LMP2 Inj. vaccine, quadrivalent HPV vaccine, quadrivalent human papillomavirus (types 6, 11, 16, 18) recombinant vaccine (GARDASIL®), recombinant fowlpox-CEA(6D)/TRICOM vaccine; recombinant vaccinia-CEA(6D)-TRICOM vaccine, recombinant modified vaccinia Ankara-5T4 vaccine, recombinant fowlpox-TRICOM vaccine, oncolytic herpes virus NV1020, HPV L1 VLP vaccine V504, human papillomavirus bivalent (types 16 and 18) vaccine (CERVARIX®), herpes simplex virus HF10, Ad5CMV-p53 gene, recombinant vaccinia DF3/MUC1 vaccine, recombinant vaccinia-MUC-1 vaccine, recombinant vaccinia-TRICOM vaccine, ALVAC MART-1 vaccine, replication-defective herpes simplex virus type I (HSV-1) vector expressing human Preproenkephalin (NP2), wild-type reovirus, reovirus type 3 Dearing (REOLYSIN®), oncolytic virus HSV1716, recombinant modified vaccinia Ankara (MVA)-based vaccine encoding Epstein-Barr virus target antigens, recombinant fowlpox-prostate specific antigen vaccine, recombinant vaccinia prostate-specific antigen vaccine, recombinant vaccinia-B7.1 vaccine, rAd-p53 gene, Ad5-delta24RGD, HPV vaccine 580299, JX-594 (thymidine kinase-deleted vaccinia virus plus GM-CSF), HPV-16/18 L1/AS04, fowlpox virus vaccine vector, vaccinia-tyrosinase vaccine, MEDI-517 HPV-16/18 VLP AS04 vaccine, adenoviral vector containing the thymidine kinase of herpes simplex virus TK99UN, HspE7, FP253/Fludarabine, ALVAC(2) melanoma multi-antigen therapeutic vaccine, ALVAC-hB7.1, canarypox-hIL-12 melanoma vaccine, Ad-REIC/Dkk-3, rAd-IFN SCH 721015, TIL-Ad-INFg, Ad-ISF35, and coxsackievirus A21 (CVA21, CAVATAK®).

[1104] In other embodiments, the multispecific or multifunctional molecule is administered in combination with a nanopharmaceutical. Exemplary cancer nanopharmaceuticals include, but not limited to, ABRAXANE® (paclitaxel bound albumin nanoparticles), CRLX101 (CPT conjugated to a linear cyclodextrin-based polymer), CRLX288 (conjugating docetaxel to the biodegradable polymer poly (lactic-co-glycolic acid)), cytarabine liposomal (liposomal Ara-C, DEPOCYT^{M}), daunorubicin liposomal (DAUNOXOME®), doxorubicin liposomal (DOXIL®, CAELYX®), encapsulated-daunorubicin citrate liposome (DAUNOXOME®), and PEG anti-VEGF aptamer (MACUGEN®).

[1105] In some embodiments, the multispecific or multifunctional molecule is administered in combination with paclitaxel or a paclitaxel formulation, e.g., TAXOL®, protein-bound paclitaxel (e.g., ABRAXANE®). Exemplary paclitaxel formulations include, but are not limited to, nanoparticle albumin-bound paclitaxel (ABRAXANE®, marketed by Abraxis Bioscience), docosahexaenoic acid bound-paclitaxel (DHA-paclitaxel, Taxoprexin, marketed by Protarga), polyglutamate bound-paclitaxel (PG-paclitaxel, paclitaxel poliglumex, CT-2103, XYOTAX, marketed by Cell Therapeutic), the tumor-activated prodrug (TAP), ANG105 (Angiopep-2 bound to three molecules of paclitaxel, marketed by ImmunoGen), paclitaxel-EC-1 (paclitaxel bound to the erbB2-recognizing peptide EC-1; see Li et al., Biopolymers (2007) 87:225-230), and glucose-conjugated paclitaxel (e.g., 2′-paclitaxel methyl 2-glucopyranosyl succinate, see Liu et al., Bioorganic & Medicinal Chemistry Letters (2007) 17:617-620).

[1106] Exemplary RNAi and antisense RNA agents for treating cancer include, but not limited to, CALAA-01, siG12D LODER (Local Drug EluteR), and ALN-VSP02.

[1107] Other cancer therapeutic agents include, but not limited to, cytokines (e.g., aldesleukin (IL-2, Interleukin-2, PROLEUKIN®), alpha Interferon (IFN-alpha, Interferon alfa, INTRON® A (Interferon alfa-2b), ROFERON-A® (Interferon alfa-2a)), Epoetin alfa (PROCRIT®), filgrastim (G-CSF, Granulocyte-Colony Stimulating Factor, NEUPOGEN®), GM-CSF (Granulocyte Macrophage Colony Stimulating Factor, sargramostim, LEUKINE™), IL-11(Interleukin-11, oprelvekin, NEUMEGA®), Interferon alfa-2b (PEG conjugate) (PEG interferon, PEG-INTRON™), and pegfilgrastim (NEULASTA™)), hormone therapy agents (e.g., aminoglutethimide (CYTADREN®), anastrozole (ARIMIDEX®), bicalutamide (CASODEX®), exemestane (AROMASIN®), fluoxymesterone (HALOTESTIN®), flutamide (EULEXIN®), fulvestrant (FASLODEX®), goserelin (ZOLADEX®), letrozole (FEMARA®), leuprolide (ELIGARD™, LUPRON®, LUPRON DEPOT®, VIADUR™) megestrol (megestrol acetate, MEGACE®), nilutamide (ANANDRON®, NILANDRON®), octreotide (octreotide acetate, SANDOSTATIN®, SANDOSTATIN LAR®), raloxifene (EVISTA®), romiplostim (NPLATE®), tamoxifen (NOVALDEX®), and toremifene (FARESTON®)), phospholipase A2 inhibitors (e.g., anagrelide (AGRYLIN®)), biologic response modifiers (e.g., BCG (THERACYS®, TICE®), and Darbepoetin alfa (ARANESP®)), target therapy agents (e.g., bortezomib (VELCADE®), dasatinib (SPRYCEL™), denileukin diftitox (ONTAK®), erlotinib (TARCEVA®), everolimus (AFINITOR®), gefitinib (IRESSA®), imatinib mesylate (STI-571, GLEEVEC™), lapatinib (TYKERB®), sorafenib (NEXAVAR®), and SU11248 (sunitinib, SUTENT®)), immunomodulatory and antiangiogenic agents (e.g., CC-5013 (lenalidomide, REVLIMID®), and thalidomide (THALOMID®)), glucocorticosteroids (e.g., cortisone (hydrocortisone, hydrocortisone sodium phosphate, hydrocortisone sodium succinate, ALA-CORT®, HYDROCORT ACETATE®, hydrocortone phosphate LANACORT®, SOLU-CORTEF®), decadron (dexamethasone, dexamethasone acetate, dexamethasone sodium phosphate, DEXASONE®, DIODEX®, HEXADROL®, MAXIDEX®), methylprednisolone (6-methylprednisolone, methylprednisolone acetate, methylprednisolone sodium succinate, DURALONE®, MEDRALONE®, MEDROL®, M-PREDNISOL®, SOLU-MEDROL®), prednisolone (DELTA-CORTEF®, ORAPRED®, PEDIAPRED®, PRELONE®), and prednisone (DELTASONE®, LIQUID PRED®, METICORTEN®, ORASONE®)), and bisphosphonates (e.g., pamidronate (AREDIA®), and zoledronic acid (ZOMETA®))

[1108] In some embodiments, the multispecific or multifunctional molecule is used in combination with a tyrosine kinase inhibitor (e.g., a receptor tyrosine kinase (RTK) inhibitor). Exemplary tyrosine kinase inhibitor include, but are not limited to, an epidermal growth factor (EGF) pathway inhibitor (e.g., an epidermal growth factor receptor (EGFR) inhibitor), a vascular endothelial growth factor (VEGF) pathway inhibitor (e.g., an antibody against VEGF, a VEGF trap, a vascular endothelial growth factor receptor (VEGFR) inhibitor (e.g., a VEGFR-1 inhibitor, a VEGFR-2 inhibitor, a VEGFR-3 inhibitor)), a platelet derived growth factor (PDGF) pathway inhibitor (e.g., a platelet derived growth factor receptor (PDGFR) inhibitor (e.g., a PDGFR-β inhibitor)), a RAF-1 inhibitor, a KIT inhibitor and a RET inhibitor. In some embodiments, the anti-cancer agent used in combination with the AHCM agent is selected from the group consisting of: axitinib (AG013736), bosutinib (SKI-606), cediranib (RECENTIN™ AZD2171), dasatinib (SPRYCEL®, BMS-354825), erlotinib (TARCEVA®), gefitinib (IRESSA®), imatinib (Gleevec®, CGP57148B, STI-571), lapatinib (TYKERB®, TYVERB®), lestaurtinib (CEP-701), neratinib (HKI-272), nilotinib (TASIGNA®), semaxanib (semaxinib, SU5416), sunitinib (SUTENT®, SU11248), toceranib (PALLADIA®), vandetanib (ZACTIMA®, ZD6474), vatalanib (PTK787, PTK/ZK), trastuzumab (HERCEPTIN®), bevacizumab (AVASTIN®), rituximab (RITUXAN®), cetuximab (ERBITUX®), panitumumab (VECTIBIX®), ranibizumab (Lucentis®), nilotinib (TASIGNA®), sorafenib (NEXAVAR®), alemtuzumab (CAMPATH®), gemtuzumab ozogamicin (MYLOTARG®), ENMD-2076, PCI-32765, AC220, dovitinib lactate (TKI258, CHIR-258), BIBW 2992 (TOVOK™), SGX523, PF-04217903, PF-02341066, PF-299804, BMS-777607, ABT-869, MP470, BIBF 1120 (VARGATEF®), AP24534, JNJ-26483327, MGCD265, DCC-2036, BMS-690154, CEP-11981, tivozanib (AV-951), OSI-930, MM-121, XL-184, XL-647, XL228, AEE788, AG-490, AST-6, BMS-599626, CUDC-101, PD153035, pelitinib (EKB-569), vandetanib (zactima), WZ3146, WZ4002, WZ8040, ABT-869 (linifanib), AEE788, AP24534 (ponatinib), AV-951 (tivozanib), axitinib, BAY 73-4506 (regorafenib), brivanib alaninate (BMS-582664), brivanib (BMS-540215), cediranib (AZD2171), CHIR-258 (dovitinib), CP 673451, CYC116, E7080, Ki8751, masitinib (AB1010), MGCD-265, motesanib diphosphate (AMG-706), MP-470, OSI-930, Pazopanib Hydrochloride, PD173074, Sorafenib Tosylate (Bay 43-9006), SU 5402, TSU-68 (SU6668), vatalanib, XL880 (GSK1363089, EXEL-2880). Selected tyrosine kinase inhibitors are chosen from sunitinib, erlotinib, gefitinib, or sorafenib. In one embodiment, the tyrosine kinase inhibitor is sunitinib.

[1109] In one embodiment, the multispecific or multifunctional molecule is administered in combination with one of more of: an anti-angiogenic agent, or a vascular targeting agent or a vascular disrupting agent. Exemplary anti-angiogenic agents include, but are not limited to, VEGF inhibitors (e.g., anti-VEGF antibodies (e.g., bevacizumab); VEGF receptor inhibitors (e.g., itraconazole); inhibitors of cell proliferatin and/or migration of endothelial cells (e.g., carboxyamidotriazole, TNP-470); inhibitors of angiogenesis stimulators (e.g., suramin), among others. A vascular-targeting agent (VTA) or vascular disrupting agent (VDA) is designed to damage the vasculature (blood vessels) of cancer tumors causing central necrosis (reviewed in, e.g., Thorpe, P. E. (2004) Clin. Cancer Res. Vol. 10:415-427). VTAs can be small-molecule. Exemplary small-molecule VTAs include, but are not limited to, microtubule destabilizing drugs (e.g., combretastatin A-4 disodium phosphate (CA4P), ZD6126, AVE8062, Oxi 4503); and vadimezan (ASA404).

### Immune Checkpoint Inhibitors

[1110] In other embodiments, methods described herein comprise use of an immune checkpoint inhibitor in combination with the multispecific or multifunctional molecule. The methods can be used in a therapeutic protocol in vivo.

[1111] In some embodiments, an immune checkpoint inhibitor inhibits a checkpoint molecule. Exemplary checkpoint molecules include but are not limited to CTLA4, PD1, PD-L1, PD-L2, TIM3, LAG3, CD160, 2B4, CD80, CD86, B7-H3 (CD276), B7-H4 (VTCN1), HVEM (TNFRSF14 or CD270), BTLA, KIR, MHC class I, MHC class II, GAL9, VISTA, BTLA, TIGIT, LAIRI, and A2aR. See, e.g., Pardoll. Nat. Rev. Cancer 12.4(2012):252-64, incorporated herein by reference.

[1112] In some embodiments, the immune checkpoint inhibitor is a PD-1 inhibitor, e.g., an anti-PD-1 antibody such as Nivolumab, Pembrolizumab or Pidilizumab. Nivolumab (also called MDX-1106, MDX-1106-04, ONO-4538, or BMS-936558) is a fully human IgG4 monoclonal antibody that specifically inhibits PD1. See, e.g., U.S. Pat. No. 8,008,449 and WO2006/121168. Pembrolizumab (also called Lambrolizumab, MK-3475, MK03475, SCH-900475 or KEYTRUDA®; Merck) is a humanized IgG4 monoclonal antibody that binds to PD-1. See, e.g., Hamid, O. et al. (2013) New England Journal of Medicine 369 (2): 134-44, U.S. Pat. No. 8,354,509 and WO2009/114335. Pidilizumab (also called CT-011 or Cure Tech) is a humanized IgGik monoclonal antibody that binds to PDi. See, e.g., WO2009/101611. In one embodiment, the inhibitor of PD-1 is an antibody molecule having a sequence substantially identical or similar thereto, e.g., a sequence at least 85%, 90%, 95% identical or higher to the sequence of Nivolumab, Pembrolizumab or Pidilizumab. Additional anti-PD1 antibodies, e.g., AMP 514 (Amplimmune), are described, e.g., in U.S. Pat. No. 8,609,089, US 2010028330, and/or US 20120114649.

[1113] In some embodiments, the PD-1 inhibitor is an immunoadhesin, e.g., an immunoadhesin comprising an extracellular/PD-1 binding portion of a PD-1 ligand (e.g., PD-L1 or PD-L2) that is fused to a constant region (e.g., an Fc region of an immunoglobulin). In some embodiments, the PD-1 inhibitor is AMP-224 (B7-DCIg, e.g., described in WO2011/066342 and WO2010/027827), a PD-L2 Fc fusion soluble receptor that blocks the interaction between B7-H1 and PD-1.

[1114] In some embodiments, the immune checkpoint inhibitor is a PD-L1 inhibitor, e.g., an antibody molecule. In some embodiments, the PD-L1 inhibitor is YW243.55.S70, MPDL3280A, MEDI-4736, MSB-0010718C, or MDX-1105. In some embodiments, the anti-PD-L1 antibody is MSB0010718C (also called A09-246-2; Merck Serono), which is a monoclonal antibody that binds to PD-L1. Exemplary humanized anti-PD-L1 antibodies are described, e.g., in WO2013/079174. In one embodiment, the PD-L1 inhibitor is an anti-PD-L1 antibody, e.g., YW243.55.S70. The YW243.55.S70 antibody is described, e.g., in WO 2010/077634. In one embodiment, the PD-L1 inhibitor is MDX-1105 (also called BMS-936559), which is described, e.g., in WO2007/005874. In one embodiment, the PD-L1 inhibitor is MDPL3280A (Genentech/Roche), which is a human Fc-optimized IgG1 monoclonal antibody against PD-L1. See, e.g., U.S. Pat. No. 7,943,743 and U.S Publication No.: 20120039906. In one embodiment, the inhibitor of PD-L1 is an antibody molecule having a sequence substantially identical or similar thereto, e.g., a sequence at least 85%, 90%, 95% identical or higher to the sequence of YW243.55.S70, MPDL3280A, MEDI-4736, MSB-0010718C, or MDX-1105.

[1115] In some embodiments, the immune checkpoint inhibitor is a PD-L2 inhibitor, e.g., AMP-224 (which is a PD-L2 Fc fusion soluble receptor that blocks the interaction between PD1 and B7-H1. See, e.g., WO2010/027827 and WO2011/066342.

[1116] In one embodiment, the immune checkpoint inhibitor is a LAG-3 inhibitor, e.g., an anti LAG-3 antibody molecule. In some embodiments, the anti-LAG-3 antibody is BMS-986016 (also called BMS986016; Bristol-Myers Squibb). BMS-986016 and other humanized anti-LAG-3 antibodies are described, e.g., in US 2011/0150892, WO2010/019570, and WO2014/008218.

[1117] In some embodiments, the immune checkpoint inhibitor is a TIM-3 inhibitor, e.g., anti-TIM3 antibody molecule, e.g., described in U.S. Pat. No. 8,552,156, WO 2011/155607, EP 2581113 and U.S Publication No.: 2014/044728.

[1118] In some embodiments, the immune checkpoint inhibitor is a CTLA-4 inhibitor, e.g., anti-CTLA-4 antibody molecule. Exemplary anti-CTLA4 antibodies include Tremelimumab (IgG2 monoclonal antibody from Pfizer, formerly known as ticilimumab, CP-675,206); and Ipilimumab (also called MDX-010, CAS No. 477202-00-9). Other exemplary anti-CTLA-4 antibodies are described, e.g., in U.S. Pat. No. 5,811,097.

### CRS Grading

[1119] In some embodiments, the compositions described herein may induce lower levels of cytokine release syndrome (CRS) and/or may have a lower chance of causing (e.g., may not cause) CRS compared to other compositions. In some embodiments, CRS can be graded in severity from 1-5 as follows. Grades 1-3 are less than severe CRS. Grades 4-5 are severe CRS. For Grade 1 CRS, only symptomatic treatment is needed (e.g., nausea, fever, fatigue, myalgias, malaise, headache) and symptoms are not life threatening. For Grade 2 CRS, the symptoms require moderate intervention and generally respond to moderate intervention. Subjects having Grade 2 CRS develop hypotension that is responsive to either fluids or one low-dose vasopressor; or they develop grade 2 organ toxicity or mild respiratory symptoms that are responsive to low flow oxygen (<40% oxygen). In Grade 3 CRS subjects, hypotension generally cannot be reversed by fluid therapy or one low-dose vasopressor. These subjects generally require more than low flow oxygen and have grade 3 organ toxicity (e.g., renal or cardiac dysfunction or coagulopathy) and/or grade 4 transaminitis. Grade 3 CRS subjects require more aggressive intervention, e.g., oxygen of 40% or higher, high dose vasopressor(s), and/or multiple vasopressors. Grade 4 CRS subjects suffer from immediately life-threatening symptoms, including grade 4 organ toxicity or a need for mechanical ventilation. Grade 4 CRS subjects generally do not have transaminitis. In Grade 5 CRS subjects, the toxicity causes death. Sets of criteria for grading CRS are provided herein as Table 39, Table 40, and Table 41. Unless otherwise specified, CRS as used herein refers to CRS according to the criteria of Table 40.

[1120] In some embodiments, CRS is graded according to Table 39:

TABLE 39
CRS grading

| | |
|---|---|
| Gr1 | Supportive care only |
| Gr2 | IV therapies +/− hospitalization. |
| Gr3 | Hypotension requiring IV fluids or low-dose vasoactives or |
| | hypoxemia requiring oxygen, CPAP, or BIPAP. |
| Gr4 | Hypotension requiring high-dose vasoactives or hypoxemia |
| | requiring mechanical ventilation. |
| Gr 5 | Death |

TABLE 40
CTCAE v 4.0 CRS grading scale

| CRS | |
|---|---|
| grade | Characteristics |
| Grade 1 | Mild; No infusion interruption; No intervention |
| Grade 2 | Infusion interruption indicated but responds promptly to |
| | symptomatic treatment (e.g., antihistamines, NSAIDS, narcotics, |
| | IV fluids); prophylactic medications indicated for <=24 hrs |
| Grade 3 | Prolonged (e.g., not rapidly responsive to symptomatic |
| | medications and/or brief interruption of infusion); recurrence |
| | of symptoms following initial improvement; hospitalization |
| | indicated for clinical sequelae (e.g., renal impairment, |
| | pulmonary infiltrates) |
| Grade 4 | Life threatening consequences; pressor or ventilator support |

TABLE 41
NCI CRS grading scale

| CRS | |
|---|---|
| grade | Characteristics |
| Grade | Symptoms are not life threatening and require symptomatic |
| 1 | treatment only; e.g., fever, nausea, fatigue, headache, myalgias, |
| | malaise |
| Grade | Symptoms require and respond to moderate intervention; |
| 2 | Oxygen requirement <40% or hypotension responsive to fluids |
| | or low dose pressors or Grade 2 organ toxicity |
| Grade | Symptoms require and respond to aggressive intervention; |
| 3 | Oxygen requirement >=40% or Hypotension requiring high dose |
| | or multiple pressors or grade 3 organ toxicity or grade 4 |
| | transaminitis |
| Grade | Life threatening symptoms Requirement for ventilator support or |
| 4 | Grade 4; organ toxicity (excluding transaminitis) |

### Example 1. Humanization of α-TRBV6-5 Antibody Clone Antibody A

[1121] The germline for the mouse α-TCRβ antibody clone Antibody A VH and VL were assigned using IMGT nomenclature, with CDR regions defined by a combined Kabat and Chothia classification. SEQ ID NO: 1 and SEQ ID NO: 2 are the Antibody A VH and VL sequences respectively where the VH germline is mouse IGHV1S12*01 and the VL germline is mouse IGKV6-15*01. SEQ ID NOs: 3-5 are the Antibody A VH CDR regions 1-3 respectively and SEQ ID NOs: 6-8 correspond to the VL CDR regions 1-3 (as described in TABLE 30).

[1122] Humanization of the Antibody A VH and VL sequences was done separately using similar methodology. Amino acids positions were identified in the framework regions which were important for the success of CDR grafting. Human germline sequences were identified which preserved the necessary residues and contained a high amount of overall identity. When the human germline framework sequence did not contain a matching important amino acid, it was back mutated to match the mouse sequence. CDR regions were grafted onto the human germline unchanged. The Antibody A VH was humanized into human IGHV1-69*01 and the Antibody A VL was humanized into IGKV1-17*01 and IGKV1-27*01. All 3 humanized sequences were confirmed to contain no introduced potential negative post translational modification sites such as NG, DG, NS, NN, DS, NT, NXS, or NXT as a result of the humanization process. SEQ ID NO: 9 is the humanized Antibody A-H.1 VH and SEQ ID NOs: 10 and 11 are the humanized VL IGKV1-17*01 and IGKV1-27*01 germlines respectively (as described in TABLE 30). FIGS. 1A and 1B show the murine and humanized sequences with annotations depicting the CDR and framework regions (FR).

### Example 2: Humanization of α-TRBV12-3 and TRBV12-4 Antibody Clone Antibody B

[1123] The germline for the mouse α-TCRβ antibody clone Antibody B VH and VL were assigned using IMGT nomenclature, with CDR regions defined by a combined Kabat and Chothia classification. SEQ ID NO: 15 and SEQ ID NO: 16 are the Antibody B VH and VL sequences respectively where the VH germline is mouse IGHV5-17*02 and the VL germline is mouse IGKV4-50*01. SEQ ID NOs: 17-19 are the B-H VH CDR regions 1-3 respectively and SEQ ID NOs: 20-22 are the B-H VL CDR regions 1-3 (as described in Table 31).

[1124] The method applied to humanize Antibody A described in Example 1 was used to humanize Antibody B. The Antibody B VH was humanized into human IGHV3-30*01, IGHV3-48*01, and IGHV3-66*01 and the Antibody B VL was humanized into human IGKV1-9*01, IGKV1-39*01, IGKV3-15*01, IGLV1-47*01 and IGLV3-10*01. SEQ ID NOs: 23-25 are the B-H.1A, B-H.1B, and B-H.1C humanized heavy chains and SEQ ID NOs: 26-30 are the B-H.1D, B-H.1E, B-H.1F, B-H.1G and B-H.1H humanized light chains (as described in Table 31). FIGS. 2A and 2B show the murine and humanized sequences with annotations depicting the CDR and framework regions (FR).

### Example 3: Characteristics of Anti-TCRβV Antibodies

[1125] Introduction

[1126] Current bispecific constructs designed to redirect T cells to promote tumor cell lysis for cancer immunotherapy typically utilize single chain variable fragments (scFvs) that are derived from monoclonal antibodies (mAb) directed against the CD3e subunit of the T cell receptor (TCR). However, there are limitations to this approach which may prevent the full realization of the therapeutic potential for such bispecific constructs. Previous studies have shown that, e.g., low “activating” doses of anti-CD3e mAb can cause long-term T cell dysfunction and exert immunosuppressive effects. In addition, anti-CD3e mAbs bind to all T cells and thus activate equally all T cells, which has been associated with the first dose side effects of anti-CD3e mAbs that result from massive T cell activation. These large number of activated T cells secrete substantial amounts of cytokines, the most important of which is Interferon gamma (IFNg). This excess amount of IFNg in turn, e.g., activates macrophages which then can overproduce proinflammatory cytokines such as IL-1, IL-6 and TNF-alpha, causing a “cytokine storm” known as the cytokine release syndrome (CRS). Thus, it might be advantageous to develop antibodies that are capable of binding and activating only a subset of necessary effector T cells to reduce the CRS.

[1127] Results

[1128] To that end, antibodies directed to the variable chain of the beta subunit of TCR (TCR Vb) were identified. These anti-TCR Vb antibodies bind and activate a subset of T cells, but with, e.g., no or markedly reduced CRS. Using plate-bound anti-TCR Vb13.1 mAbs (A-H.1 and A-H.2) it was shown that a population of T cells, defined by positive staining with A-H.1, can be expanded (from ˜5% of T cells on day 0 to almost 60% of total T cells on day 6 of cell culture) (FIGS. 4A-4C). For this experiment, human CD3+ T cells were isolated using magnetic-bead separation (negative selection) and activated with immobilized (plate-coated) A-H.1 or OKT3 (anti-CD3e) antibodies at 100 nM for 6 days. The expanded Vb13.1+ T cells display cytolytic activity against transformed cell line RPMI-8226 when co-cultured with purified CD3+ T cells (FIGS. 5A-5B).

[1129] Next, the ability of PBMCs activated by anti-TCR VB antibodies to produce cytokines was assessed. The cytokine production of PBMCs activated with anti-TCR VB antibodies was compared to the cytokine production of PBMCs activated with: (i) anti-CD3e antibodies (OKT3 or SP34-2); (ii) anti-TCR V alpha (TCR VA) antibodies including anti-TCR VA 12.1 antibody 6D6.6, anti-TCR VA24JA18 antibody 6B11; (iii) anti-TCR alpha beta antibody T10B9; and/or (iv) isotype control (BGM0109). The anti-TCR VB antibodies tested include: humanized anti-TCRVB 13.1 antibodies (A-H.1, or A-H.2), murine anti-TCR VB5 antibody E, murine anti-TCR VB8.1 antibody B, and murine anti-TCR VB12 antibody D. BGM0109 comprises the amino acid sequence of

(SEQ ID NO: 3282)
METDTLLLWVLLLWVPGSTGGLNDIFEAQKIEWHEGGGGSEPRTDTDTC
PNPPDPCPTCPTPDLLGGPSVFIFPPKPKDVLMISLTPKITCVVVDVSE
EEPDVQFNWYVNNVEDKTAQTETRQRQYNSTYRVVSVLPIKHQDWMSGK
VFKCKVNNNALPSPIEKTISKPRGQVRVPQIYTFPPPIEQTVKKDVSVT
CLVTGFLPQDIHVEWESNGQPQPEQNYKNTQPVLDSDGSYFLYSKLNVP
KSRWDQGDSFTCSVIHEALHNHHMTKTISRSLGNGGGGS.

[1130] As shown in FIG. 6A, when plate-bound A-H.1 or A-H.2, or anti-CD3e antibodies (OKT3 or SP34-2) were used to activate human PBMCs, the T cell cytokine IFNg was induced (FIG. 6A). All anti-TCR VB antibodies tested had a similar effect on the production of IFNg (FIG. 6B). The anti-TCR VA antibodies did not induce similar IFNg production.

[1131] With respect to IL-2 production, PBMCs activated with A-H.1 and A-H.2 resulted in increased IL-2 production (FIG. 7A) with delayed kinetics (FIG. 7B) as compared to PBMCs activated with anti-CD3e antibodies (OKT3 or SP34-2). FIG. 7B shows that anti-TCR VB antibody activated PBMCs demonstrate peak production of IL-2 at Day 5 or Day 6 post-activation (incubation with plate-coated antibodies). In contrast, IL-2 production in PBMCs activated with OKT3 peaked at day 2 post-activation. As with IFNG, the IL-2 effect (e.g., enhanced production of IL-2 and delayed kinetics) was similar across all anti-TCR VB antibodies tested (FIG. 7B).

[1132] The production of cytokines IL-6, IL-1β and TNF-alpha which are associated with “cytokine storms” (and accordingly CRS) was also assessed under similar conditions. FIGS. 8A, 9A and 10A shows that while PBMCs activated with anti-CD3e antibodies demonstrate production of IL-6 (FIG. 8A), TNF-alpha (FIG. 9A) and IL-1β (FIG. 10A), no or little induction of these cytokines was observed with PBMCs activated with A-H.1 or A-H.2. As shown in FIGS. 9B and 10B, TNF-alpha and IL-1β production was not induced by activation of PBMCs with any of the anti-TCR VB antibodies.

[1133] It was further noted that the kinetics of IFNg production by A-H.1-activated CD3+ T cells was delayed relative to those produced by CD3+ T cells activated by anti-CD3e mAbs (OKT3 and SP34-2) (FIGS. 11A and 11B).

[1134] Finally, it was observed that the subset of memory effector T cells known as T_{EM}RA was preferentially expanded in CD8+ T cells activated by A-H.1 or A-H.2 (FIG. 12). Isolated human PBMCs were activated with immobilized (plate-coated) anti-CD3e or anti-TCR Vβ13.1 at 100 nM for 6-days. After a 6-day incubation, T-cell subsets were identified by FACS staining for surface markers for Naive T cell (CD8+, CD95-, CD45RA+, CCR7+), T stem cell memory (TSCM; CD8+, CD95+, CD45RA+, CCR7+), T central memory (Tcm; CD8+, CD95+, CD45RA-, CCR7+), T effector memory (Tem; CD8+, CD95+, CD45RA-, CCR7-), and T effector memory re-expressing CD45RA (Temra; CD8+, CD95+, CD45RA+, CCR7-). Human PBMCs activated by anti-TCR Vβ 13.1 antibodies (A-H.1 or A-H.2) increased CD8+TSCM and Temra T cell subsets when compared to PBMCs activated by anti-CD3e antibodies (OKT3 or SP34-2). Similar expansion was observed with CD4+ T cells.

### CONCLUSION

[1135] The data provided in this Example show that antibodies directed against TCR Vb can, e.g., preferentially activate a subset of T cells, leading to an expansion of T_{EMRA}, which can, e.g., promote tumor cell lysis but not CRS. Thus, bispecific constructs utilizing either a Fab or scFv or a peptide directed to the TCR Vb can, e.g., be used to activate and redirect T cells to promote tumor cell lysis for cancer immunotherapy, without, e.g., the harmful side-effects of CRS associated with anti-CD3e targeting.

### Example 4: On-Target T Cell Mediated Cytotoxicity of Multiple Myeloma (MM) Cells with a Dual-Targeting Antibody Molecule Against BCMA and a T Cell Engager

[1136] This example shows on-target T cell mediated cytotoxicity of multiple myeloma (MM) cells with dual-targeting antibody molecules that recognize a T cell engager, e.g., TCRVb, on T cells and BCMA on MM cells.

[1137] As shown in FIG. 13A, purified human T cells activated with plate-bound anti-TCRVb antibody for 5 days proliferate at a higher rate than purified human T cells activated with plate-bound anti-CD3 (OKT3) antibody. Anti-TCRVb antibody stimulation of T cells resulted in selective expansion of CD45RA+ effector memory CD8+ and CD4+ T cells (TEMRA) cells (FIG. 13B). Both CD8+ and CD4+ Temra cell populations expanded more when stimulated with an anti-TCRVb antibody, compared to unstimulated cells or cells stimulated with an anti-CD3 (SP34) antibody. Anti-TCRVb antibodies resulted in delayed secretion of IFN-g by PBMCs stimulated with an anti-TCRVb antibody compared to PBMCs stimulated with anti-CD3 antibodies (FIG. 13C). Additionally, T cells stimulated with anti-TCRVb antibody or anti-CD3 antibodies resulted in comparable lysis of multiple myeloma target cells, as shown in FIG. 13D. As shown in FIGS. 13E-13F, T cells stimulated for 5 days with 100 ng/ml plate-bound an anti-TCRVb antibody, or an anti-CD3 antibody secreted perforin and Granzyme B.

[1138] Activation of PBMCs with anti-TCRVb antibody resulted in higher production and/or secretion of IL-2 and/or IL-15 compared to PBMCs activated with an anti-OKT3 antibody (FIG. 14A). Anti-TCRVb antibody activated of PBMCs also resulted in expansion and/or survival, e.g., proliferation of Natural Killer (NK) cells (FIG. 14B). In comparison, PBMCS activated with an anti-OKT3 antibody did not result in NK cell expansion. Further, as described in Example 3, PBMCs activated with an anti-TCRVb antibody did not result in the production of cytokines IL-6, IL-1β and TNF-alpha which are associated with CRS (FIG. 15). These in vitro characterization studies show that in some embodiments, anti-TCRVb antibodies, e.g., activate and/or stimulate, T cells to promote T cell killing as evidenced by target cell lysis, perforin secretion and granzyme B secretion, and secretion of IFN-g with, e.g., delayed kinetics.

[1139] Next, the ability of a dual-targeting antibody molecule, which targets BCMA on one arm and TCRVb on the other arm, to target and kill multiple myeloma (MM) cells was tested. Healthy donor PBMCs were co-incubated with the RMPI8226 MM cell line and one of the following dual-targeting antibody molecules: BCMA-TCRVb, BCMA-CD3, or Control-TCRVb; or an isotype control Target cell lysis was then assessed using flow cytometry. As shown in FIG. 16A, the dual-targeting BCMA-TCRVb antibody molecule resulted in killing of MM cells in vitro.

[1140] The dual-targeting BCMA-TCRVb antibody molecule was further tested in vivo for its ability to inhibit MM tumor growth in a MM mouse model. The NCI-H929 cell line was injected in NOD-scid IL2rγnull (NSG)recipient mice on Day 0 followed by delivery of PBMCs on Day 9. On Days 12, 15, 18 and 21, the dual-targeting BCMA-TCRVb antibody molecule was administered via intraperitoneal injection at a dose of 0.5 mg/kg. FIG. 16B shows prevention, e.g., inhibition, of MM tumor growth in vivo with the dual-targeting BCMA-TCRVb antibody molecule. These results demonstrate that in some embodiments the dual-targeting BCMA-TCRVb antibody molecule, e.g., can kill tumor cells, e.g., MM tumor cells, in vitro and in vivo. Accordingly, in some embodiments, a dual-targeting BCMA-TCRVb antibody molecule can be used, e.g., as a therapy for cancer, e.g., a hematological cancer, e.g., MM.

### Example 5: In Vitro Cytotoxicity of a Dual-Targeting Antibody Molecule Against FcRH5 and a T Cell Engager

[1141] This example shows in vitro cytotoxicity on multiple myeloma (MM) cells with a dual-targeting antibody molecule that recognizes a T cell engager, e.g., TCRVb, on T cells and FcRH5 on MM cells. Healthy donor PBMCs or purified T cells were co-incubated with the MOL8M MM cell line and a dual-targeting antibody molecule which targets FcRH5 on one arm and TCRVb on the other arm, or with an isotype control antibody. Target cell lysis was then assessed using flow cytometry. As shown in FIG. 17, the dual targeting FcRH5-TCRVb molecule resulted in killing of MM cells by both purified T cells or PBMCs. This shows that the dual targeting FcRH5-TCRVb molecule can target and promote killing of MM cells by immune cells, e.g., in PBMCs, including T cells.

### Example 6: Immunization of Armenian Hamster to Generate Anti-NKp30 Antibodies

[1142] Briefly, Armenian hamsters were immunized with the extracellular domain of human NKp30 protein in complete Freund's adjuvant and boosted twice on day 14 and day 28 with NKp30 in incomplete Freund's adjuvant (IFA). On day 56 one more boost in IFA was given and the animals harvested three days later. Spleens were collected and fused with P3X63Ag8.653 murine myeloma cell line. 0.9×10\hat{ }5 cells/well in 125 μl were seated in 96 well plate and feed with 125 μl of I-20+2ME+ HAT (IMDM (4 g/L glucose) supplemented with 20% fetal bovine serum, 4 mM L-glutamine, 1 mM sodium pyruvate, 50 U penicillin, 50 μg streptomycin and 50 μM 2-ME in the absence or presence of HAT or HT for selection, and Hybridoma Cloning Factor (1% final) on days 7, 11 and thereafter as needed. At approximately 2 weeks after fusion (cells are about 50% confluent) supernatant was collected and assayed for binding.

### Example 7: Hybridoma Screen for NKp30 mAbs

[1143] Expi293 cells were transfected with BG160 (hNKp30 cell antigen) 18 hours prior to screening. The day of screening, transfected cells were diluted to 0.05×10\hat{ }⁶/mL and anti-Armenian hamster Fc Alexa Fluor 488 added to a final concentration of 0.4 ug/mL. 50 uL (2,500 cells) of this mixture was added to each well of a 384 well plate. The same density of untransfected 293 cells with secondary were used as a negative control. 5 uL of hybridoma supernatant was added to the cell mixture and the plate incubated for 1 hour at 37° C. The plates were then imaged on Mirrorball. Positive clones were identified and subcloned by serial dilution to obtain clonal selected hybridoma. After reconfirmation using the same protocols the hybridoma cells were harvested and the corresponding heavy and light chain sequences recovered. The DNA was subcloned into pcDNA3.4 for subsequent expression of the corresponding antibodies and further validation.

### Example 8: Binding of NKp30 Antibodies to NK92 Cells

[1144] NK-92 cells were washed with PBS containing 0.5% BSA and 0.1% sodium azide (staining buffer) and added to 96-well V-bottom plates with 200,000 cells/well. Hamster NKp30 antibodies were added to the cells in 2.0 fold serial dilutions and incubated for 1 hour at room temperature. The plates were washed twice with staining buffer. The secondary antibody against hamster Fc conjugated to AF647 (Jackson, 127-605-160) was added at 1:100 dilution (1.4 mg/ml stock) and incubated with the cells for 30 minutes at 4° C. followed by washing with staining buffer. Cells were subsequently were fixed for 10 minutes with 4% paraformaldehyde at room temperature. The plates were read on CytoFLEX LS (Beckman Coulter). Data was calculated as the percent-AF747 positive population (FIG. 22).

### Example 9: Bioassay to Measure Activity of NKp30 Antibodies Using NK92 Cell Line

[1145] NKp30 antibodies were three-fold serially diluted in PBS and incubated at 2-8° C. overnight in flat bottom 96 well plates. Plates were washed twice in PBS and 40,000 NK-92 cells were added in growth medium containing IL-2. Plates were incubated at 37° C., 5% CO2, humidified incubator for 16-24 hours before supernatants were collected. IFNγ levels in supernatants was measured following MSD assay instructions (FIG. 23). Supernatant collected from cells incubated with hamster isotype IgG was used as negative control and supernatants from cells incubated with NKp30 monoclonal antibody (R&D, clone 210847) was utilized as a positive control. Data were generated using hamster anti-NKp30 mABs.

### Example 10: Characterization of Anti-Calreticulin Antibodies

[1146] A murine anti-calreticulin antibody AbM-1 (also referred to as BIM0031) which comprises a VH of SEQ ID NO: 6250 and a VL of SEQ ID NO: 6252 was humanized. Five humanized VHs (SEQ ID NOs: 6372 and 234-237 shown in Table 16) and five humanized VLs (SEQ ID NOs: 238-242 shown in Table 16) were generated. All the humanized VHs comprise a cysteine to alanine substitution in HCDR2. Antibodies BJM0040-BJM0064, as disclosed in Table 19, were synthesized and characterized for their biochemical and functional activities.

[1147] Briefly, expression level of purified proteins was measured after protein A elution. Proteins were analyzed by analytical SEC to assess aggregation and tested by differential scanning fluorimetry (DSF) to identify more stable cantidates. Binding affinity of the cantidates was measured in ELISA assay against mutant calreticulin C-terminal peptide fused to a human Fc. The results were summarized in Table 22. Humanized antibodies comprising the cysteine to alanine substitution in HCDR2 demonstrated reduced aggregation compared to the parental murine antibody.

TABLE 22
Summary of characterization of anti-calreticulin antibodies

| | yield | % aggregation | Tm | ELISA |
|---|---|---|---|---|
| | (mg/L) | after ProA | (C.) | IC50 |
| BJM0040 | 95.7 | 0 | 75 | 12.34 |
| BJM0041 | 193.6 | 5.3 | 75 | 18.79 |
| BJM0042 | 106.7 | 0 | 75 | 10.52 |
| BJM0043 | 181.5 | 3 | 75 | 8.279 |
| BJM0044 | 161.7 | 5.6 | 75 | 16.19 |
| BJM0045 | 42.9 | 8 | 73 | ~836101 |
| BJM0046 | 116.6 | 7.5 | 76 | ~362165 |
| BJM0047 | 93.5 | 7 | 76 | 802.9 |
| BJM0048 | 111.1 | 6 | 75 | 430.3 |
| BJM0049 | 103.4 | 6.8 | 76 | 943.6 |
| BJM0050 | 261.8 | 10.3 | — | 597627 |
| BJM0051 | 112.2 | 7.4 | 77 | 780.7 |
| BJM0052 | 123.2 | 12.4 | 77 | 776.2 |
| BJM0053 | 132 | 10.3 | 76 | 357.2 |
| BJM0054 | 128.7 | 12.3 | 77 | 657.2 |
| BJM0055 | 72.6 | 17.1 | 69 | 1E+06 |
| BJM0056 | 113.3 | 11.6 | 69 | 889.5 |
| BJM0057 | 67.1 | 12.1 | 69 | 4E+06 |
| BJM0058 | 92.4 | 9.1 | 69 | 498.4 |
| BJM0059 | 136.4 | 12 | 68 | 83.11 |
| BJM0060 | 134.2 | 7.5 | 72 | ~4347 |
| BJM0061 | 140.8 | 8.5 | 73 | 356 |
| BJM0062 | 91.3 | 8.5 | 73 | 351.8 |
| BJM0063 | 145.2 | 8.8 | 73 | 988.6 |
| BJM0064 | 139.7 | 10 | 73 | 637.4 |
| BIM0031 | | | | 24.32 |

### Example 11: Generation and Characterization of Humanized Anti-NKp30 Antibodies

[1148] A series of hamster anti-NKp30 antibodies were selected. These antibodies were shown to bind to human NKp30 and cynomolgus NKp30 and induce IFNγ production from NK-90 cells (data not shown). The VH and VL sequences of exemplary hamster anti-NKp30 antibodies 15E1, 9G1, 151H6, 9D9, 3A12, and 12D10 are disclosed in Table 9. The VH and VL sequences of exemplary humanized anti-NKp30 antibodies based on 15E1, 9G1, and 151H6 are also disclosed in Table 9. The Kabat CDRs of these antibodies are disclosed in Table 34 and Table 8.

[1149] Two humanized constructs based on 15E1 were selected. The first construct BJM0407 is a Fab comprising a heavy chain variable region comprising the amino acid sequence of SEQ ID NO: 7302 and a lambda light chain variable region comprising the amino acid sequence of SEQ ID NO: 7305. Its corresponding scFv construct BJM0859 comprises the amino acid sequence of SEQ ID NO: 7310. The second construct BJM0411 is a Fab comprising a heavy chain variable region comprising the amino acid sequence of SEQ ID NO: 7302 and a kappa light chain variable region comprising the amino acid sequence of SEQ ID NO: 7309. Its corresponding scFv construct BJM0860 comprises the amino acid sequence of SEQ ID NO: 7311. BJM0407 and BJM0411 showed comparable biophysical characteristics, e.g., binding affinity to NKp30 and thermal stability. The scFv constructs BJM0859 and BJM0860 also showed comparable biophysical properties.

### Example 12: Binding of an Exemplary Anti-Calreticulin Antibody Molecule to Wild-Type or Mutant Calreticulin

[1150] In this example, an exemplary anti-calreticulin antibody molecule, BKM0106 (parental IgG form of antibody 6C10), was tested for binding to wild-type calreticulin (CALR WT) compared to two calreticulin mutants (CALR ins and CALR del, the sequences of which are listed in Table 2 as SEQ ID Nos: 1002 and 1003, respectively). Two ELISA tests were run, one in which the antigen was coated in the plate, and one in which the antibody was coated on the plate.

[1151] For the experiment in which antigen was coated on the plate, a Maxisorp plate was coated with CALR WT, CALR in, or CALR del protein. The plate was blocked with 3% BSA. BKM0106 was diluted to 100 nM and added to the wells. Anti-Human HRP (Jackson Immunoresearch 309-035-008) 1:20,000 was added to each well. 1-Step Turbo TMB-ELISA Substrate solution was added and the reaction was stopped by adding 1M HCl. The plate was read at 450 nm.

[1152] For the experiment in which antibody was coated on the plate, a Maxisorp plate was coated with BKM0106. The plate was blocked with 3% BSA. CALR WT, CALR ins, and CALR del were diluted to 100 nM and added to separate wells. Anti-His-Tag-HRP (Southern Biotech 4603-05) 1:5,000 was added to each well. 1-Step Turbo TMB-ELISA Substrate solution was added and the reaction was stopped by adding 1M HCl. The plate was read at 450 nm.

[1153] As shown in FIGS. 25A-25B, the exemplary antibody BKM0106 bound to the CALR ins and CALR del mutants, but did not bind to wild-type calreticulin.

### Example 13: Binding of an Exemplary Anti-Calreticulin Antibody Molecule to Cells Expressing Mutant Calreticulin

[1154] In this example, an exemplary anti-calreticulin antibody molecule, BKM0106 (parental IgG form of antibody 6C10), was tested for binding to cells expressing mutant calreticulin (CALR ins and CALR del, the sequences of which are listed in Table 2 as SEQ ID Nos: 1002 and 1003, respectively). Briefly, Expi293F cells (Thermo Fisher A14527) were triple transfected with BH470 (human TpoR), BH472 (human JAK2) and either human CALR ins, human CALR del, or BH800 (human CALR WT) cell antigens. BKM0106 and the hIgG1 isotype control at 0.78, 1.56, 3.125, 6.25, 12.5, 25, and 50 nM were added to the wells. Cells were incubated with secondary antibody Alexa Fluor 488 Anti-Human IgG (Jackson ImmunoResearch 109-545-088) 1:200. Zombie Violet BV412 (BioLegend 423114) viability dye was added to the cells 1:100.

[1155] As shown in FIGS. 26A-26B, BKM0106 bound to both CALR ins and CALR del with similar responses.

### Example 14: Targeting mtCALR+ Cells Via Bridging mtCALR+ Cells to Immune Effector Cells Via Bispecific Antibodies

[1156] In this example, a series of antibody molecules was tested for therapeutic efficacy in a syngeneic murine cancer model. Briefly, surrogate molecules with a mIgG2a backbone were generated from the exemplary anti-calreticulin antibody molecule 6C10 and each of the following effector arms:
[1157] BKM0201-mutCALR-6C10 monoclonal-ADCC enabled
[1158] BKM0202-mutCALR-6C10×TCRvB (2×2) bispecific-LALAPG
[1159] BKM0204-mutCALR-6C10×CD3-2C11 (1×1) bispecific-LALAPG

[1160] The therapeutic efficacy of the above molecules were tested in a systemic murine model generated using Ba/F3 cells engineered cells expressing mtCALR, hMPL, and hJAK2. On day 1 of the study, 2×10\hat{ }6 engineered Ba/F3 mtCALR, hMPL, hJAK2 cells, suspended in PBS, were intravenously injected in to female Balb/C mice. Mice were treated a dose of 1 mg/kg or 5 mg/kg of CALR×/TCRvB and control bispecific molecules every three days for a total of 4 doses (day 4, 7, 10 and 13) by intravenous bolus injection. Animals were monitored for humane endpoints and Body weights were monitored twice weekly. All animals were euthanized on day 15 and spleens were excised, and spleen weights were monitored as a surrogate for disease burden. Data indicates that vehicle treated mice in Ba/F3 mtCALR, hMPL, hJAK2 cell engrafted mice show nearly three-fold increase in spleen weight as compared to the naïve mice suggesting increased disease burden.

[1161] As shown in FIG. 27, all three antibody treated mice showed a significant decrease in spleen weights as compared to vehicle control.

### Example 15: Biacore Analysis of Exemplary Anti-NKp30 Antibody Molecules

[1162] In this example, a series of exemplary anti-NKp30 antibody molecules were analyzed for their binding affinity for NKp30. Briefly, surface plasmon resonance (SPR) measurements were performed by using the BIAcore T200. Human NKp30 (BKM0179) was immobilized on a CM5 chip via anti-mouse Fc antibody to a response of 50 RU. Each exemplary antibody construct were injected at concentrations of 3.9, 7.8, 15.6, 31.2, 62.5, and 125 nM, and at a flow rate of 20 μl/min, over the surface on which the human NKp30 was immobilized. The data was fit using a 1:1 binding model.

[1163] As shown in Table 23, most of the exemplary antibodies showed preserved affinity to human NKp30 compared to the parental antibody.

TABLE 23
Biacore results

| | | Human Nkp30 | |
|---|---|---|---|
| Construct | Description | (BKM0179) | |
| BJM1078 | BJM0407 Parental | 1.48 | nM |
| BJM1079 | BJM0411 Parental | 1.26 | nM |
| BKM0138 | BJM0411 VL-N95A | 3.2 | nM |
| BKM0139 | BJM0411 VL-D92A | 3.2 | nM |
| BKM0140 | BJM0407 VL-D92A | 3.3 | nM |
| BKM0141 | BJM0407 VL-N95A | 3.0 | nM |
| BKM0142 | BJM0411 VH-N60A | 1.28 | nM |
| BKM0143 | BJM0407 VH-N60A | 1.45 | nM |
| BKM0144 | BJM0411 VH-N60A-VL-D92A-N95A | 6.4 | nM |
| BKM0145 | BJM0407 VH-N60A-VL-D92A-N95A | 4.2 | nM |

### Example 16: Production and Assessment of Exemplary Anti-CD3 Antibody Molecules

[1164] Production of Anti-CD3 Antibody Molecules

[1165] Four C57/BL6 mice were immunized with KLH conjugated CD3e peptide bearing the sequence QDGNEEMGGITQTPYKVSISGTTVILTC (SEQ ID NO: 7487). Animals were bled three days after fourth immunization to check for titers. After the fourth immunization, animals were boosted twice with the antigen. Three to four days after final boost, animals are sacrificed for spleen or lymph node tissue harvest. Spleen was fused using standard fusion methods which produced 20 plates of hybridoma cells. The primary screen was performed using ELISA by checking binding to the peptide followed by CD3e protein. One clone, 4D4, was selected for expansion and following subcloning protocol, generated monoclonal hybridoma.

[1166] Binding of Anti-CD3 Antibody Molecules to CD3 In Vitro

[1167] In this example, exemplary humanized anti-CD3 antibody molecules BKM0020, BKM0025, BKM0028, BKM0038 (as described herein) were tested for their binding affinity to human or cynomolgus CD3e using surface plasmon resonance (SPR). SPR measurements were performed by using the BIAcore T200. Each construct was immobilized on a CM5 chip via Anti-human Fc antibody to a response of 200 RU. Human CD3e (Acro Biosystems CDE-H5223) was diluted to 500 nM and then diluted two-fold. Each analyte concentration was injected at a flow rate of 20 μl/min over the surface on which each antibody was immobilized. The data was fit using a 1:1 binding model. Binding affinity results are shown in FIG. 28. Affinity to human CD3e was preserved compared to the parental and affinity to cyno CD3e was two to three-fold lower compared to the parental antibody.

[1168] Binding of Anti-CD3 Antibody Molecules to CD3 Expressed on Cells

[1169] Binding of the exemplary humanized anti-CD3 antibodies to CD3-expressing Jurkat cells was performed using FACS. Antibodies were tested in a series of 3-fold dilutions starting with 10 ug/ml concentration and detected using anti-human IgG secondary antibodies conjugated to AF647. As shown in FIG. 29, humanized anti-CD3 mAb showed strong binding to Jurkat cells expressing CD3.

### Example 17: Generation of Anti-Calreticulin (CALR) Antibodies

[1170] Two Armenian Hamsters (86 and 87) were immunized with mutCALR 5 bp ins (BJ028) antigen. Hamster #86 was chosen to perform fusion using standard procedures. Fusion produced 12 hybridoma plates that were screened by ELISA for binding to BJ028 (mut CALR ins), BJ027 (wild-type CALR) and BIM0167 (CALR mutant peptide fused to a human Fc). 15 clones were further selected for expansion and subcloning. Two clones were selected for further characterization and sequencing to obtain V gene sequences. The hamster sequences were further humanized by grafting CDRs on to human frameworks. The resulting humanized mAbs were tested for binding using Biacore and FACS, e.g., as described above.

### Example 18: Optimization of α-TRBV6-5 Antibody

[1171] The anti TRBV6-5 antibody was optimized to improve affinity for the human and cyno antigen, improve thermal stability, and remove sequence motifs that might pose chemical stability liabilities. ScFv libraries were built using random mutagenesis (Caldwell et al. (1992) Randomization of genes by PCR mutagenesis. PCR Meth. Appl. 2:28) or a modified version of Kunkel mutagenesis (Kunkel T A. (1985) Rapid and efficient site-specific mutagenesis without phenotypic selection. PNAS 82(2): 488-92). For affinity improvement, library selections vs human and cyno antigens were performed using standard phage display (Lee, C M et al. (2007) Selection of human antibody fragments by phage display. Nature protocols 2, 3001) and yeast display techniques (Chao G, et al. (2006) Isolating and engineering human antibodies using yeast surface display. Nature Protocols. 1(2):755-69). Thermal challenge of phage or yeast populations was used to select for clones with improved thermal stability. Selections were followed by standard screening methods such as ELISA and flow cytometry to identify individual clones with improved properties. Following hit sequencing and analysis of mutation-activity correlation, second-generation libraries were constructed using the same methods above. Library selections and individual clone screening were repeated as above with the modification that more stringent conditions were applied to select for clones with maximized activity. Following hit sequencing, scFv genes were reformatted into the biologically relevant antibody format for expression, purification, and triaging.

### INCORPORATION BY REFERENCE

[1172] All publications and patents mentioned herein are hereby incorporated by reference in their entirety as if each individual publication or patent was specifically and individually indicated to be incorporated by reference.

### EQUIVALENTS

[1173] Those skilled in the art will recognize, or be able to ascertain using no more than routine experimentation, many equivalents to the specific embodiments of the invention described herein. Such equivalents are intended to be encompassed by the following claims.

### EXEMPLARY EMBODIMENTS

[1174] Additional features of any of the aforesaid multifunctional molecules, nucleic acids, vectors, host cells, or methods include one or more of the following exemplary embodiments.

[1175] Those skilled in the art will recognize, or be able to ascertain using no more than routine experimentation, many equivalents to the specific embodiments of the invention described herein. Such equivalents are intended to be encompassed by the following exemplary embodiments.

### Exemplary Embodiment 1

[1176] The disclosure relates, inter alia, to novel multispecific or multifunctional molecules that include (i) an antigen binding domain that binds to a calreticulin protein (e.g., a wild-type or mutant calreticulin protein); and one, two or all of: (ii) an immune cell engager (e.g., chosen from an NK cell engager, a T cell engager, a B cell engager, a dendritic cell engager, or a macrophage cell engager); (iii) a cytokine molecule; and/or (iv) a stromal modifying moiety. The terms “multispecific” or “multifunctional” are used interchangeably herein.

[1177] Without wishing to be bound by theory, the multispecific or multifunctional molecules disclosed herein are expected to target (e.g., localize, bridge and/or activate) an immune cell (e.g., an immune effector cell chosen form an NK cell, a T cell, a B cell, a dendritic cell or a macrophage), at a target cell, e.g., a cancer cell, expressing a calreticulin protein (e.g., a wild-type or mutant calreticulin protein), and/or alter the tumor stroma, e.g., alter the tumor microenvironment near the cancer site. Increasing the proximity and/or activity of the immune cell using the multispecific molecules described herein is expected to enhance an immune response against the target cell (e.g., the cancer cell), thereby providing a more effective therapy (e.g., a more effective cancer therapy). Without being bound by theory, a targeted, localized immune response against the target cell (e.g., the cancer cell) is believed to reduce the effects of systemic toxicity of the multispecific molecules described herein.

[1178] Accordingly, provided herein are, inter alia, multispecific molecules (e.g., multispecific or multifunctional antibody molecules) that include the aforesaid moieties, nucleic acids encoding the same, methods of producing the aforesaid molecules, and methods of treating a cancer using the aforesaid molecules.

[1179] In an aspect, the disclosure features a method of detecting calreticulin (e.g., wild-type or mutant calreticulin) in a sample or subject, comprising: contacting the sample or subject with an anti-calreticulin antibody molecule described herein; and detecting formation of a complex between the antibody molecule and the sample or subject, thereby detecting calreticulin (e.g., wild-type or mutant calreticulin).

[1180] In some embodiments, calreticulin (e.g., wild-type or mutant calreticulin) is detected in vitro or in vivo.

[1181] In some embodiments, the method further comprises contacting a reference sample or subject with the antibody molecule; and detecting formation of a complex between the antibody molecule and the reference sample or subject, wherein a change, e.g., a statistically significant change, in the formation of the complex in the sample or subject, relative to the reference sample or subject is indicative of the presence of calreticulin (e.g., wild-type or mutant calreticulin) in the sample or subject.

[1182] In some embodiments, the method further comprises obtaining a sample from a subject.

[1183] In some embodiments, the sample comprises one or more of plasma, tissue (e.g., cancerous tissue), biopsy, blood (e.g., whole blood), PBMCs, bone marrow, and/or lymphatic tissue, e.g., lymph node. In some embodiments, the sample has not been frozen and/or fixed. In some embodiments, the sample has been formalin-fixed (e.g., formalin-fixed, paraffin-embedded (FFPE). In some embodiments, the sample has been stained (e.g., for analysis by immunohistochemistry). In some embodiments, the sample has been frozen and/or fixed.

[1184] In some embodiments, the subject has, or is at risk of having, a disease or disorder described herein (e.g., cancer, e.g., a myelofibrosis).

[1185] In some embodiments, the method further comprises performing a flow cytometry analysis, e.g., using a multi-panel method. In some embodiments, the method further comprises performing an immunohistochemical (IHC) analysis, e.g. monochrome or in a multiplexed format. In some embodiments, the IHC method comprises brightfield chromogenic IHC. In embodiments, the brightfield chromogenic IHC method comprises direct detection of antigens by primary antibodies, e.g., which are directly labeled with different chromogens. In some embodiments, the IHC method comprises fluorescent IHC. In embodiments, the fluorescent IHC method comprises direct detection of antigens by primary antibodies, e.g., which are directly labeled with different fluorophores. In some embodiments, the method further comprises performing immunohistochemistry on a sample, e.g., a fixed sample, e.g., an FFPE sample. In some embodiments, the method further comprises measuring the level of calreticulin+(e.g., wild-type calreticulin+ or mutant calreticulin+) cells from the biological sample (e.g., determining if calreticulin+(e.g., wild-type calreticulin+ or mutant calreticulin+) cells are depleted, e.g., relative to a reference sample or subject. In some embodiments, the method further comprises measuring the intracellular level of calreticulin (e.g., wild-type or mutant calreticulin). In some embodiments, the method further comprises measuring the membrane level of calreticulin (e.g., wild-type or mutant calreticulin).

[1186] In some embodiments, the method comprises combining two or more of the detection methods described herein. In embodiments, the method comprises a nucleic acid-based method and an antibody-based method.

[1187] In some embodiments, the method further comprises evaluating the subject for a change in prognosis, severity, or presence or absence of a disease or disorder (e.g., cancer, e.g., myelofibrosis), e.g., after treatment (e.g., with an antibody molecule described herein).

[1188] In some embodiments, the antibody molecule is detectably labeled. In some embodiments, the antibody molecule is an anti-calreticulin (e.g., wild-type or mutant calreticulin) antibody molecule.

[1189] In an aspect, the disclosure features a method of evaluating a subject, comprising: contacting a sample (e.g., a sample described herein) from the subject with an anti-calreticulin (e.g., wild-type or mutant calreticulin) antibody molecule described herein; and
[1190] detecting formation of a complex between the antibody molecule and the sample, thereby evaluating the subject.

[1191] In some embodiments, the subject has, or is at risk of having, a disease or disorder described herein (e.g., cancer, e.g., myelofibrosis). In some embodiments, the subject has not been treated with an antibody molecule described herein. In some embodiments, the subject has been treated with an antibody molecule described herein.

[1192] In an aspect, the disclosure features a kit comprising an anti-calreticulin (e.g., wild-type or mutant calreticulin) antibody molecule described herein and instructions for use in a method of detecting calreticulin (e.g., wild-type or mutant calreticulin) in a sample or subject, e.g., in accordance with a method described herein.

[1193] Accordingly, in one aspect, the disclosure features a multifunctional molecule that includes:
[1194] (i) a first antigen binding domain that binds to a calreticulin protein (e.g., a wild-type or mutant calreticulin protein), e.g., a calreticulin-targeting antigen binding domain disclosed in any one of Table 4, Table 5, Table 6, Table 24, Table 25, Table 16, Table 17, Table 18, or Table 19,
[1195] and
[1196] (ii) a second antigen binding domain that binds to TCRβV, e.g., an anti-TCRβV antigen binding domain disclosed in any one of Table 30, Table 31, Table 32, Table 33, Table 11, Table 12, or Table 13, or a second antigen binding domain that binds to NKp30, e.g., an anti-NKp30 antigen binding domain disclosed in Tables 7, Table 8, Table 35, Table 36, Table 9, Table 10, or Table 34.

[1197] In some embodiments, the second antigen binding domain binds to TCRβV.

[1198] In some embodiments, the second antigen binding domain activates a T cell or the second antigen binding domain does not activate a T cell.

[1199] In some embodiments, the second antigen binding domain binds to TCRβ V12 or TCRβ V6 (e.g., comprising the amino acid sequence of SEQ ID NO: 1044).

[1200] In some embodiments, the second antigen binding domain comprises one or more amino acid sequences as listed in Table 30, Table 31, Table 32, Table 33, Table 11, Table 12, or Table 13.

[1201] In some embodiments, the second antigen binding domain comprises:
[1202] (a) a heavy chain variable region (VH) and/or a light chain variable region (VL), wherein:
[1203] (i) the VH comprises a heavy chain complementarity determining region 1 (VHCDR1) having an amino acid sequence of a VHCDR1 in Table 30, Table 31, Table 33, Table 11, Table 12, or Table 13 (or a sequence with no more than 1, 2, 3, or 4 mutations, e.g., substitutions, additions, or deletions), a VHCDR2 having an amino acid sequence of a VHCDR2 in Table 30, Table 31, Table 33, Table 11, Table 12, or Table 13 (or a sequence with no more than 1, 2, 3, or 4 mutations, e.g., substitutions, additions, or deletions), and/or a VHCDR3 having an amino acid sequence of a VHCDR3 in Table 30, Table 31, Table 33, Table 11, Table 12, or Table 13 (or a sequence with no more than 1, 2, 3, or 4 mutations, e.g., substitutions, additions, or deletions),
[1204] (ii) the VL comprises a light chain complementarity determining region 1 (VLCDR1) having an amino acid sequence of a VLCDR1 in Table 30, Table 31, Table 33, Table 11, Table 12, or Table 13 (or a sequence with no more than 1, 2, 3, or 4 mutations, e.g., substitutions, additions, or deletions), a VLCDR2 having an amino acid sequence of a VLCDR2 in Table 30, Table 31, Table 33, Table 11, Table 12, or Table 13 (or a sequence with no more than 1, 2, 3, or 4 mutations, e.g., substitutions, additions, or deletions), and/or a VLCDR3 having an amino acid sequence of a VLCDR3 in Table 30, Table 31, Table 33, Table 11, Table 12, or Table 13 (or a sequence with no more than 1, 2, 3, or 4 mutations, e.g., substitutions, additions, or deletions);
[1205] (b) a heavy chain variable region (VH) and/or a light chain variable region (VL), wherein:
[1206] (i) the VH comprises a heavy chain complementarity determining region 1 (VHCDR1) amino acid sequence of SEQ ID NO: 3 (or a sequence with no more than 1, 2, 3, or 4 mutations, e.g., substitutions, additions, or deletions), a VHCDR2 amino acid sequence of SEQ ID NO: 4 (or a sequence with no more than 1, 2, 3, or 4 mutations, e.g., substitutions, additions, or deletions), and/or a VHCDR3 amino acid sequence of SEQ ID NO: 5 (or a sequence with no more than 1, 2, 3, or 4 mutations, e.g., substitutions, additions, or deletions), and/or
[1207] (ii) the VL comprises a light chain complementarity determining region 1 (VHCDR1) amino acid sequence of SEQ ID NO: 6 (or a sequence with no more than 1, 2, 3, or 4 mutations, e.g., substitutions, additions, or deletions), a VHCDR2 amino acid sequence of SEQ ID NO: 7 (or a sequence with no more than 1, 2, 3, or 4 mutations, e.g., substitutions, additions, or deletions), and/or a VHCDR3 amino acid sequence of SEQ ID NO: 8 (or a sequence with no more than 1, 2, 3, or 4 mutations, e.g., substitutions, additions, or deletions);
[1208] (c) a heavy chain variable region (VH) and/or a light chain variable region (VL), wherein:
[1209] (i) the VH comprises a heavy chain complementarity determining region 1 (VHCDR1) amino acid sequence of SEQ ID NO: 45 (or a sequence with no more than 1, 2, 3, or 4 mutations, e.g., substitutions, additions, or deletions), a VHCDR2 amino acid sequence of SEQ ID NO: 46 (or a sequence with no more than 1, 2, 3, or 4 mutations, e.g., substitutions, additions, or deletions), and/or a VHCDR3 amino acid sequence of SEQ ID NO: 47 (or a sequence with no more than 1, 2, 3, or 4 mutations, e.g., substitutions, additions, or deletions), and/or
[1210] (ii) the VL comprises a light chain complementarity determining region 1 (VHCDR1) amino acid sequence of SEQ ID NO: 51 (or a sequence with no more than 1, 2, 3, or 4 mutations, e.g., substitutions, additions, or deletions), a VHCDR2 amino acid sequence of SEQ ID NO: 52 (or a sequence with no more than 1, 2, 3, or 4 mutations, e.g., substitutions, additions, or deletions), and/or a VHCDR3 amino acid sequence of SEQ ID NO: 53 (or a sequence with no more than 1, 2, 3, or 4 mutations, e.g., substitutions, additions, or deletions); and/or
[1211] (d) a heavy chain variable region (VH) and/or a light chain variable region (VL), wherein:
[1212] (i) the VH comprises a heavy chain complementarity determining region 1 (VHCDR1) amino acid sequence of SEQ ID NO: 48 (or a sequence with no more than 1, 2, 3, or 4 mutations, e.g., substitutions, additions, or deletions), a VHCDR2 amino acid sequence of SEQ ID NO: 49 (or a sequence with no more than 1, 2, 3, or 4 mutations, e.g., substitutions, additions, or deletions), and/or a VHCDR3 amino acid sequence of SEQ ID NO: 50 (or a sequence with no more than 1, 2, 3, or 4 mutations, e.g., substitutions, additions, or deletions), and/or
[1213] (ii) the VL comprises a light chain complementarity determining region 1 (VHCDR1) amino acid sequence of SEQ ID NO: 54 (or a sequence with no more than 1, 2, 3, or 4 mutations, e.g., substitutions, additions, or deletions), a VHCDR2 amino acid sequence of SEQ ID NO: 55 (or a sequence with no more than 1, 2, 3, or 4 mutations, e.g., substitutions, additions, or deletions), and/or a VHCDR3 amino acid sequence of SEQ ID NO: 56 (or a sequence with no more than 1, 2, 3, or 4 mutations, e.g., substitutions, additions, or deletions).

[1214] In some embodiments, the second antigen binding domain comprises:
[1215] (a) a heavy chain variable region (VH) and/or a light chain variable region (VL), wherein:
[1216] (i) the VH comprises the amino acid sequence of a VH in Table 30, Table 31, Table 33, Table 11, Table 12, or Table 13 (or an amino acid sequence having at least about 77%, 80%, 85%, 90%, 95%, or 99% sequence identity thereto), and/or
[1217] (ii) the VL comprises the amino acid sequence of a VL in Table 30, Table 31, Table 33, Table 11, Table 12, or Table 13 (or an amino acid sequence having at least about 77%, 80%, 85%, 90%, 95%, or 99% sequence identity thereto)
[1218] (iii) the VH comprises the amino acid sequence of SEQ ID NO: 9 (or an amino acid sequence having at least about 77%, 80%, 85%, 90%, 95%, or 99% sequence identity thereto), and/or
[1219] (iv) the VL comprises the amino acid sequence of SEQ ID NO: 10 (or an amino acid sequence having at least about 77%, 80%, 85%, 90%, 95%, or 99% sequence identity thereto);
[1220] (b) a heavy chain variable region (VH) and/or a light chain variable region (VL), wherein:
[1221] (i) the VH comprises the amino acid sequence of SEQ ID NO: 9 (or an amino acid sequence having at least about 77%, 80%, 85%, 90%, 95%, or 99% sequence identity thereto), and/or
[1222] (ii) the VL comprises the amino acid sequence of SEQ ID NO: 11 (or an amino acid sequence having at least about 77%, 80%, 85%, 90%, 95%, or 99% sequence identity thereto); and/or
[1223] (c) a heavy chain variable region (VH) and/or a light chain variable region (VL), wherein:
[1224] (i) the VH comprises the amino acid sequence of SEQ ID NO: 1312 (or an amino acid sequence having at least about 77%, 80%, 85%, 90%, 95%, or 99% sequence identity thereto), and/or
[1225] (ii) the VL comprises the amino acid sequence of SEQ ID NO: 1314 (or an amino acid sequence having at least about 77%, 80%, 85%, 90%, 95%, or 99% sequence identity thereto).

[1226] In some embodiments, the second antigen binding domain comprises:
[1227] (a) a heavy chain variable region (VH) and/or a light chain variable region (VL), wherein:
[1228] (i) the VH comprises a heavy chain complementarity determining region 1 (VHCDR1) amino acid sequence of SEQ ID NO: 17 (or a sequence with no more than 1, 2, 3, or 4 mutations, e.g., substitutions, additions, or deletions), a VHCDR2 amino acid sequence of SEQ ID NO: 18 (or a sequence with no more than 1, 2, 3, or 4 mutations, e.g., substitutions, additions, or deletions), and/or a VHCDR3 amino acid sequence of SEQ ID NO: 19 (or a sequence with no more than 1, 2, 3, or 4 mutations, e.g., substitutions, additions, or deletions), and/or
[1229] (ii) the VL comprises a light chain complementarity determining region 1 (VHCDR1) amino acid sequence of SEQ ID NO: 20 (or a sequence with no more than 1, 2, 3, or 4 mutations, e.g., substitutions, additions, or deletions), a VHCDR2 amino acid sequence of SEQ ID NO: 21 (or a sequence with no more than 1, 2, 3, or 4 mutations, e.g., substitutions, additions, or deletions), and/or a VHCDR3 amino acid sequence of SEQ ID NO: 22 (or a sequence with no more than 1, 2, 3, or 4 mutations, e.g., substitutions, additions, or deletions);
[1230] (b) a heavy chain variable region (VH) and/or a light chain variable region (VL), wherein:
[1231] (i) the VH comprises a heavy chain complementarity determining region 1 (VHCDR1) amino acid sequence of SEQ ID NO: 57 (or a sequence with no more than 1, 2, 3, or 4 mutations, e.g., substitutions, additions, or deletions), a VHCDR2 amino acid sequence of SEQ ID NO: 58 (or a sequence with no more than 1, 2, 3, or 4 mutations, e.g., substitutions, additions, or deletions), and/or a VHCDR3 amino acid sequence of SEQ ID NO: 59 (or a sequence with no more than 1, 2, 3, or 4 mutations, e.g., substitutions, additions, or deletions), and/or
[1232] (ii) the VL comprises a light chain complementarity determining region 1 (VHCDR1) amino acid sequence of SEQ ID NO: 63 (or a sequence with no more than 1, 2, 3, or 4 mutations, e.g., substitutions, additions, or deletions), a VHCDR2 amino acid sequence of SEQ ID NO: 64 (or a sequence with no more than 1, 2, 3, or 4 mutations, e.g., substitutions, additions, or deletions), and/or a VHCDR3 amino acid sequence of SEQ ID NO: 65 (or a sequence with no more than 1, 2, 3, or 4 mutations, e.g., substitutions, additions, or deletions); and/or
[1233] (c) a heavy chain variable region (VH) and/or a light chain variable region (VL), wherein:
[1234] (i) the VH comprises a heavy chain complementarity determining region 1 (VHCDR1) amino acid sequence of SEQ ID NO: 60 (or a sequence with no more than 1, 2, 3, or 4 mutations, e.g., substitutions, additions, or deletions), a VHCDR2 amino acid sequence of SEQ ID NO: 61 (or a sequence with no more than 1, 2, 3, or 4 mutations, e.g., substitutions, additions, or deletions), and/or a VHCDR3 amino acid sequence of SEQ ID NO: 62 (or a sequence with no more than 1, 2, 3, or 4 mutations, e.g., substitutions, additions, or deletions), and/or
[1235] (ii) the VL comprises a light chain complementarity determining region 1 (VHCDR1) amino acid sequence of SEQ ID NO: 66 (or a sequence with no more than 1, 2, 3, or 4 mutations, e.g., substitutions, additions, or deletions), a VHCDR2 amino acid sequence of SEQ ID NO: 67 (or a sequence with no more than 1, 2, 3, or 4 mutations, e.g., substitutions, additions, or deletions), and/or a VHCDR3 amino acid sequence of SEQ ID NO: 68 (or a sequence with no more than 1, 2, 3, or 4 mutations, e.g., substitutions, additions, or deletions).

[1236] In some embodiments, the second antigen binding domain comprises:
[1237] (a) a heavy chain variable region (VH) and/or a light chain variable region (VL), wherein:
[1238] (i) the VH comprises the amino acid sequence of SEQ ID NO: 15 (or an amino acid sequence having at least about 77%, 80%, 85%, 90%, 95%, or 99% sequence identity thereto), and/or
[1239] (ii) the VL comprises the amino acid sequence of SEQ ID NO: 16 (or an amino acid sequence having at least about 77%, 80%, 85%, 90%, 95%, or 99% sequence identity thereto); and/or
[1240] (b) a heavy chain variable region (VH) and/or a light chain variable region (VL), wherein:
[1241] (i) the VH comprises: the amino acid sequence of SEQ ID NO: 23 (or an amino acid sequence having at least about 77%, 80%, 85%, 90%, 95%, or 99% sequence identity thereto), the amino acid sequence of SEQ ID NO: 24 (or an amino acid sequence having at least about 77%, 80%, 85%, 90%, 95%, or 99% sequence identity thereto), or the amino acid sequence of SEQ ID NO: 25 (or an amino acid sequence having at least about 77%, 80%, 85%, 90%, 95%, or 99% sequence identity thereto); and/or
[1242] (ii) the VL comprises: the amino acid sequence of SEQ ID NO: 26 (or an amino acid sequence having at least about 77%, 80%, 85%, 90%, 95%, or 99% sequence identity thereto), the amino acid sequence of SEQ ID NO: 27 (or an amino acid sequence having at least about 77%, 80%, 85%, 90%, 95%, or 99% sequence identity thereto), the amino acid sequence of SEQ ID NO: 28 (or an amino acid sequence having at least about 77%, 80%, 85%, 90%, 95%, or 99% sequence identity thereto), the amino acid sequence of SEQ ID NO: 29 (or an amino acid sequence having at least about 77%, 80%, 85%, 90%, 95%, or 99% sequence identity thereto), or the amino acid sequence of SEQ ID NO: 30 (or an amino acid sequence having at least about 77%, 80%, 85%, 90%, 95%, or 99% sequence identity thereto).

[1243] In some embodiments, the multifunctional molecule comprises: a first polypeptide comprising, e.g., from N-terminus to C-terminus, a first VL and a first CL, a second polypeptide comprising, e.g., from N-terminus to C-terminus, a first VH, a first CH1, a first dimerization domain (e.g., a first Fc), and a first moiety that binds to TCR (e.g., TCRVβ) (e.g., a first scFv that binds to TCR (e.g., TCRVβ)),
[1244] a third polypeptide comprising, e.g., from N-terminus to C-terminus, a second VH, a second CH1, a second dimerization domain (e.g., a second Fc), and optionally a second moiety that binds to TCR (e.g., TCRVβ) (e.g., a second scFv that binds to TCR (e.g., TCRVβ)),
[1245] a fourth polypeptide comprising, e.g., from N-terminus to C-terminus, a second VL and a second CL, wherein:
[1246] the first VL and the first VH form a first antigen binding domain that binds to a first calreticulin protein, and the second VL and the second VH form a third antigen binding domain that binds to a second calreticulin protein,
[1247] optionally wherein the first and second calreticulin proteins comprise the amino acid sequence of SEQ ID NO: 6285, 1001, or 6286,
[1248] optionally wherein the first and second calreticulin mutant proteins are each independently chosen from: a molecule comprising the amino acid sequence of SEQ ID NO: 6313, or a molecule comprising the amino acid sequence of SEQ ID NO: 6314, optionally wherein the multifunctional molecule comprises the configuration of FIG. 3A or 3B.

[1249] In some embodiments, the second antigen binding domain binds to NKp30.

[1250] In some embodiments, the second antigen binding domain is chosen from an antibody molecule, e.g., an antigen binding domain, or ligand that binds to (e.g., activates) NKp30, e.g., the second antigen binding domain is an antibody molecule or ligand that binds to (e.g., activates) NKp30.

[1251] In some embodiments, the second antigen binding domain comprises:
[1252] (i) a heavy chain variable region (VH) comprising a heavy chain complementarity determining region 1 (VHCDR1) having an amino acid sequence of a VHCDR1 of Table 7, Table 35, Table 9, Table 10, or Table 34 (or a sequence with no more than 1, 2, 3, or 4 mutations, e.g., substitutions, additions, or deletions), a VHCDR2 having an amino acid sequence of a VHCDR2 of Table 7, Table 35, Table 9, Table 10, or Table 34 (or a sequence with no more than 1, 2, 3, or 4 mutations, e.g., substitutions, additions, or deletions), and/or a VHCDR3 having an amino acid sequence of a VHCDR3 of Table 7, Table 35, Table 9, Table 10, or Table 34 (or a sequence with no more than 1, 2, 3, or 4 mutations, e.g., substitutions, additions, or deletions), and/or
[1253] (ii) a light chain variable region (VL) comprising a light chain complementarity determining region 1 (VLCDR1) having an amino acid sequence of a VLCDR1 of Table 8, Table 36, Table 9, Table 10, or Table 34 (or a sequence with no more than 1, 2, 3, or 4 mutations, e.g., substitutions, additions, or deletions), a VLCDR2 having an amino acid sequence of a VLCDR2 of Table 8, Table 36, Table 9, Table 10, or Table 34 (or a sequence with no more than 1, 2, 3, or 4 mutations, e.g., substitutions, additions, or deletions), and/or a VLCDR3 having an amino acid sequence of a VLCDR3 of Table 8, Table 36, Table 9, Table 10, or Table 34 (or a sequence with no more than 1, 2, 3, or 4 mutations, e.g., substitutions, additions, or deletions).

[1254] In some embodiments, the second antigen binding domain comprises:
[1255] (i) a heavy chain variable region (VH) comprising a heavy chain complementarity determining region 1 (VHCDR1) amino acid sequence of SEQ ID NO: 7313 (or a sequence with no more than 1, 2, 3, or 4 mutations, e.g., substitutions, additions, or deletions), a VHCDR2 amino acid sequence of SEQ ID NO: 6001 (or a sequence with no more than 1, 2, 3, or 4 mutations, e.g., substitutions, additions, or deletions, and/or a VHCDR3 amino acid sequence of SEQ ID NO: 7315 (or a sequence with no more than 1, 2, 3, or 4 mutations, e.g., substitutions, additions, or deletions; and/or
[1256] (ii) a light chain variable region (VL) comprising a light chain complementarity determining region 1 (VLCDR1) amino acid sequence of SEQ ID NO: 7326 (or a sequence with no more than 1, 2, 3, or 4 mutations, e.g., substitutions, additions, or deletions), a VLCDR2 amino acid sequence of SEQ ID NO: 7327 (or a sequence with no more than 1, 2, 3, or 4 mutations, e.g., substitutions, additions, or deletions), and/or a VLCDR3 amino acid sequence of SEQ ID NO: 7329 (or a sequence with no more than 1, 2, 3, or 4 mutations, e.g., substitutions, additions, or deletions).

[1257] In some embodiments, the second antigen binding domain comprises:
[1258] (i) a VH comprising the amino acid sequence of any of SEQ ID NOs: 7298 or 7300-7304 (or an amino acid sequence having at least about 75%, 80%, 85%, 90%, 95%, or 99% sequence identity to any of SEQ ID NOs: 7298 or 7300-7304); and/or
[1259] (ii) a VL comprising the amino acid sequence of any of SEQ ID NOs: 7299 or 7305-7309 (or an amino acid sequence having at least about 93%, 95%, or 99% sequence identity to any of SEQ ID NOs: 7299 or 7305-7309).

[1260] In some embodiments, the second antigen binding domain comprises:
[1261] (i) a VH comprising the amino acid sequence of SEQ ID NO: 7302 (or an amino acid sequence having at least about 75%, 80%, 85%, 90%, 95%, or 99% sequence identity to 7302), and a VL comprising the amino acid sequence of SEQ ID NO: 7305 (or an amino acid sequence having at least about 75%, 80%, 85%, 90%, 95%, or 99% sequence identity to 7305); or
[1262] (ii) a VH comprising the amino acid sequence of SEQ ID NO: 7302 (or an amino acid sequence having at least about 75%, 80%, 85%, 90%, 95%, or 99% sequence identity to 7302), and a VL comprising the amino acid sequence of SEQ ID NO: 7309 (or an amino acid sequence having at least about 75%, 80%, 85%, 90%, 95%, or 99% sequence identity to 7309).

[1263] In some embodiments, the second antigen binding domain comprises:
[1264] (i) an amino acid sequence of SEQ ID NO: 7310 (or an amino acid sequence having at least about 75%, 80%, 85%, 90%, 95%, or 99% sequence identity to 7310); or
[1265] (ii) an amino acid sequence of SEQ ID NO: 7311 (or an amino acid sequence having at least about 75%, 80%, 85%, 90%, 95%, or 99% sequence identity to 7311).

[1266] In some embodiments, the second antigen binding domain comprises:
[1267] (i) a heavy chain variable region (VH) comprising a heavy chain complementarity determining region 1 (VHCDR1) amino acid sequence of SEQ ID NO: 6000, a VHCDR2 amino acid sequence of SEQ ID NO: 6001, and/or a VHCDR3 amino acid sequence of SEQ ID NO: 6002, and
[1268] (ii) a light chain variable region (VL) comprising a light chain complementarity determining region 1 (VLCDR1) amino acid sequence of SEQ ID NO: 6063, a VLCDR2 amino acid sequence of SEQ ID NO: 6064, and/or a VLCDR3 amino acid sequence of SEQ ID NO: 7293.

[1269] In some embodiments, the second antigen binding domain comprises:
[1270] (1) a heavy chain variable region (VH) comprising a heavy chain framework region 1 (VHFWR1) having an amino acid sequence of a VHFWR1 of Table 7, Table 35, Table 9, Table 10, or Table 34 (or a sequence with no more than 1, 2, 3, 4, 5, or 6 mutations, e.g., substitutions, additions, or deletions, therefrom), a VHFWR2 having an amino acid sequence of a VHFWR2 of Table 7, Table 35, Table 9, Table 10, or Table 34 (or a sequence with no more than 1, 2, 3, 4, 5, or 6 mutations, e.g., substitutions, additions, or deletions, therefrom), a VHFWR3 having an amino acid sequence of a VHFWR3 of Table 7, Table 35, Table 9, Table 10, or Table 34 (or a sequence with no more than 1, 2, 3, 4, 5, or 6 mutations, e.g., substitutions, additions, or deletions, therefrom), or a VHFWR4 having an amino acid sequence of a VHFWR4 of Table 7, Table 35, Table 9, Table 10, or Table 34 (or a sequence with no more than 1, 2, 3, 4, 5, or 6 mutations, e.g., substitutions, additions, or deletions, therefrom), and/or
[1271] (2) a light chain variable region (VL) comprising a light chain framework region 1 (VLFWR1) having an amino acid sequence of a VLFWR1 of Table 8, Table 36, Table 9, Table 10, or Table 34 (or a sequence with no more than 1, 2, 3, 4, 5, or 6 mutations, e.g., substitutions, additions, or deletions, therefrom), a VLFWR2 having an amino acid sequence of a VLFWR2 of Table 8, Table 36, Table 9, Table 10, or Table 34 (or a sequence with no more than 1, 2, 3, 4, 5, or 6 mutations, e.g., substitutions, additions, or deletions, therefrom), a VLFWR3 having an amino acid sequence of a VLFWR3 of Table 8, Table 36, Table 9, Table 10, or Table 34 (or a sequence with no more than 1, 2, 3, 4, 5, or 6 mutations, e.g., substitutions, additions, or deletions, therefrom), or a VLFWR4 having an amino acid sequence of a VLFWR4 of Table 8, Table 36, Table 9, Table 10, or Table 34 (or a sequence with no more than 1, 2, 3, 4, 5, or 6 mutations, e.g., substitutions, additions, or deletions, therefrom).

[1272] In some embodiments, the second antigen binding domain comprises:
[1273] (1) a heavy chain variable region (VH) comprising a heavy chain framework region 1 (VHFWR1) amino acid sequence of SEQ ID NO: 6003, a VHFWR2 amino acid sequence of SEQ ID NO: 6004, a VHFWR3 amino acid sequence of SEQ ID NO: 6005, or a VHFWR4 amino acid sequence of SEQ ID NO: 6006, and
[1274] (3) a light chain variable region (VL) comprising a light chain framework region 1 (VLFWR1) amino acid sequence of SEQ ID NO: 6066, a VLFWR2 amino acid sequence of SEQ ID NO: 6067, a VLFWR3 amino acid sequence of SEQ ID NO: 7292, or a VLFWR4 amino acid sequence of SEQ ID NO: 6069.

[1275] In some embodiments, the second antigen binding domain comprises:
[1276] (i) a VH comprising the amino acid sequence of a VH of Table 7, Table 35, Table 9, Table 10, or Table 34 (or an amino acid sequence having at least about 75%, 80%, 85%, 90%, 95%, or 99% sequence identity thereto), and/or
[1277] (ii) a VL comprising the amino acid sequence of a VL of Table 8, Table 36, Table 9, Table 10, or Table 34 (or an amino acid sequence having at least about 93%, 95%, or 99% sequence identity thereto).

[1278] In some embodiments, the second antigen binding domain comprises a heavy chain comprising the amino acid sequence of a heavy chain of Table 10 (or an amino acid sequence having at least about 75%, 80%, 85%, 90%, 95%, or 99% sequence identity thereto).

[1279] In some embodiments, the second antigen binding domain comprises a light chain comprising the amino acid sequence of a light chain of Table 10 (or an amino acid sequence having at least about 75%, 80%, 85%, 90%, 95%, or 99% sequence identity thereto).

[1280] In some embodiments, the second antigen binding domain comprises a heavy chain comprising the amino acid sequence of a heavy chain of Table 10 (or an amino acid sequence having at least about 75%, 80%, 85%, 90%, 95%, or 99% sequence identity thereto), and a light chain comprising the amino acid sequence of a light chain of Table 10 (or an amino acid sequence having at least about 75%, 80%, 85%, 90%, 95%, or 99% sequence identity thereto).

[1281] In some embodiments, the multispecific molecule comprises:
[1282] a first polypeptide comprising, e.g., from N-terminus to C-terminus, a first VL and a first CL, a second polypeptide comprising, e.g., from N-terminus to C-terminus, a first VH, a first CH1, a first dimerization domain (e.g., a first Fc), and a first moiety that binds to NKp30 (e.g., a first antibody molecule or ligand that binds to NKp30),
[1283] a third polypeptide comprising, e.g., from N-terminus to C-terminus, a second VH, a second CH1, a second dimerization domain (e.g., a second Fc), and optionally a second moiety that binds to NKp30 (e.g., a second antibody molecule or ligand that binds to NKp30), a fourth polypeptide comprising, e.g., from N-terminus to C-terminus, a second VL and a second CL, wherein:
[1284] the first VL and the first VH form a first antigen binding domain that binds to a first calreticulin protein, and the second VL and the second VH from a third antigen binding domain that binds to a second calreticulin protein,
[1285] optionally wherein the first and second calreticulin proteins comprise the amino acid sequence of SEQ ID NO: 6285, 1001, or 6286,
[1286] optionally wherein the first and second calreticulin mutant proteins are each independently chosen from: a molecule comprising the amino acid sequence of SEQ ID NO: 6313, or a molecule comprising the amino acid sequence of SEQ ID NO: 6314, optionally wherein the multifunctional molecule comprises the configuration of FIG. 3A or 3B.

[1287] In some embodiments, the calreticulin protein comprises an amino acid sequence chosen from SEQ ID NOs: 6285-6312 or 1001, optionally wherein the calreticulin protein comprises an amino acid sequence chosen from SEQ ID NOs: 6313-6346 or 1002-1003.

[1288] In some embodiments, the calreticulin protein comprises the amino acid sequence of SEQ ID NO: 6285 or 1001.

[1289] In some embodiments, the calreticulin protein comprises the amino acid sequence of SEQ ID NO: 6286.

[1290] In some embodiments, the first antigen binding domain binds to an epitope located within the C-terminus of the calreticulin protein, optionally wherein the first antigen binding domain binds to an epitope located within the amino acid sequence of SEQ ID NO: 6285, 1001, or 6286.

[1291] In some embodiments, the multispecific molecule further comprises: a third antigen binding domain that binds to a second calreticulin protein, e.g., wherein the second calreticulin mutant protein comprises the amino acid sequence of SEQ ID NO: 6285, 1001, or 6286, optionally wherein:
[1292] (i) the third antigen binding domain is different from the first antigen binding domain, or
[1293] (ii) the third antigen binding domain is the same as the first antigen binding domain.

[1294] In some embodiments, the second calreticulin molecule is the same as the calreticulin molecule bound by the first antigen binding domain.

[1295] In some embodiments, the second calreticulin molecule is different from the calreticulin molecule bound by the first antigen binding domain.

[1296] In some embodiments, the second calreticulin protein comprises an amino acid sequence chosen from SEQ ID NOs: 6285-6312 or 1001, optionally wherein the second calreticulin protein comprises an amino acid sequence chosen from SEQ ID NOs: 6313-6346 or 1002-1003.

[1297] In some embodiments, the calreticulin protein bound by the first antigen binding domain comprises the amino acid sequence of SEQ ID NO: 6285 or 1001, and the second calreticulin protein comprises the amino acid sequence of SEQ ID NO: 6286.

[1298] In some embodiments, the third antigen binding domain binds to an epitope located within the C-terminus of the second calreticulin protein, optionally wherein the third antigen binding domain binds to an epitope located within the amino acid sequence of SEQ ID NO: 6285, 1001, or 6286.

[1299] In some embodiments, the first antigen binding domain comprises:
[1300] (i) a heavy chain variable region (VH) comprising a heavy chain complementarity determining region 1 (VHCDR1) having an amino acid sequence of a VHCDR1 in Table 4, Table 24, Table 25, or Table 17 (or a sequence with no more than 1, 2, 3, or 4 mutations, e.g., substitutions, additions, or deletions), a VHCDR2 having an amino acid sequence of a VHCDR2 in Table 4, Table 24, Table 25, or Table 17 (or a sequence with no more than 1, 2, 3, or 4 mutations, e.g., substitutions, additions, or deletions), and/or a VHCDR3 having an amino acid sequence of a VHCDR3 in Table 4, Table 24, Table 25, or Table 17 (or a sequence with no more than 1, 2, 3, or 4 mutations, e.g., substitutions, additions, or deletions);
[1301] (ii) a light chain variable region (VL) comprising a light chain complementarity determining region 1 (VHCDR1) having an amino acid sequence of a VLCDR1 in Table 5, Table 24, Table 25, or Table 18 (or a sequence with no more than 1, 2, 3, or 4 mutations, e.g., substitutions, additions, or deletions), a VHCDR2 having an amino acid sequence of a VLCDR2 in Table 5, Table 24, Table 25, or Table 18 (or a sequence with no more than 1, 2, 3, or 4 mutations, e.g., substitutions, additions, or deletions), and/or a VHCDR3 having an amino acid sequence of a VLCDR3 in Table 5, Table 24, Table 25, or Table 18 (or a sequence with no more than 1, 2, 3, or 4 mutations, e.g., substitutions, additions, or deletions);
[1302] (iii) a VH comprising the amino acid sequence of a VH in Table 24, Table 25, or Table 16 (or an amino acid sequence having at least about 77%, 80%, 85%, 90%, 95%, or 99% sequence identity thereto);
[1303] (iv) a VL comprising the amino acid sequence of a VL in Table 24, Table 25, or Table 16 (or an amino acid sequence having at least about 93%, 95%, or 99% sequence identity thereto);
[1304] (v) a VH comprising a heavy chain framework region 1 (VHFWR1) having an amino acid sequence of a VHFWR1 in Table 4 or Table 6 (or a sequence with no more than 1, 2, 3, 4, 5, 6, 7, 8, or 9 mutations, e.g., substitutions, additions, or deletions), a VHFWR2 having an amino acid sequence of a VHFWR2 in Table 4 or Table 6 (or a sequence with no more than 1, 2, 3, 4, 5, 6, 7, 8, or 9 mutations, e.g., substitutions, additions, or deletions), a VHFWR3 having an amino acid sequence of a VHFWR3 in Table 4 or Table 6 (or a sequence with no more than 1, 2, 3, 4, 5, 6, 7, 8, or 9 mutations, e.g., substitutions, additions, or deletions), and/or a VHFWR4 having an amino acid sequence of a VHFWR4 in Table 4 or Table 6 (or a sequence with no more than 1, 2, 3, 4, 5, 6, 7, 8, or 9 mutations, e.g., substitutions, additions, or deletions), and/or
[1305] (vi) a VL comprising a light chain framework region 1 (VLFWR1) having an amino acid sequence of a VLFWR1 in Table 5 or Table 6 (or a sequence with no more than 1, 2, 3, 4, 5, 6, 7, 8, or 9 mutations, e.g., substitutions, additions, or deletions), a VLFWR2 having an amino acid sequence of a VLFWR2 in Table 5 or Table 6 (or a sequence with no more than 1, 2, 3, 4, 5, 6, 7, 8, or 9 mutations, e.g., substitutions, additions, or deletions), a VLFWR3 having an amino acid sequence of a VLFWR3 in Table 5 or Table 6 (or a sequence with no more than 1, 2, 3, 4, 5, 6, 7, 8, or 9 mutations, e.g., substitutions, additions, or deletions), and/or a VLFWR4 having an amino acid sequence of a VLFWR4 in Table 5 or Table 6 (or a sequence with no more than 1, 2, 3, 4, 5, 6, 7, 8, or 9 mutations, e.g., substitutions, additions, or deletions).

[1306] In some embodiments, the multifunctional molecule further comprises a tumor-targeting moiety.

[1307] In some embodiments, the tumor-targeting moiety binds to a tumor antigen.

[1308] In some embodiments, the tumor antigen is selected from G6B, CD34, CD41, P-selectin, Clec2, cKIT, FLT3, MPL, ITGB3, ITGB2, GP5, GP6, GP9, GP1BA, DSC2, FCGR2A, TNFRSF10A, TNFRSF10B, or TM4SF1.

[1309] In some embodiments, the tumor-targeting moiety comprises an antibody molecule, e.g., that binds to a tumor antigen selected from G6B, CD34, CD41, P-selectin, Clec2, cKIT, FLT3, MPL, ITGB3, ITGB2, GP5, GP6, GP9, GP1BA, DSC2, FCGR2A, TNFRSF10A, TNFRSF10B, or TM4SF1.

[1310] In some embodiments, the tumor-targeting moiety comprises a VH and/or VL sequence, e.g., as listed in Table 38 or Table 20.

[1311] In some embodiments, the multifunctional molecule preferentially binds to a myeloproliferative neoplasm cell over a non-tumor cell, optionally wherein the binding between the multifunctional molecule and the myeloproliferative neoplasm cell is more than 10, 20, 30, 40, 50-fold greater than the binding between the multifunctional molecule and a non-tumor cell.

[1312] In some embodiments, the myeloproliferative neoplasm cell is chosen from a myelofibrosis cell, an essential thrombocythemia cell, a polycythemia vera cell, or a chronic myeloid cancer cell, optionally wherein: the myeloproliferative neoplasm cell does not comprise a JAK2 V617F mutation, or the myeloproliferative neoplasm cell does not comprise a MPL mutation.

[1313] In some embodiments, the multispecific molecule further comprises a linker, e.g., a linker between the first antigen binding domain and the second antigen binding domain.

[1314] In some embodiments, the linker is chosen from: a cleavable linker, a non-cleavable linker, a peptide linker, a flexible linker, a rigid linker, a helical linker, or a non-helical linker.

[1315] In some embodiments, the linker is a peptide linker.

[1316] In some embodiments, the peptide linker comprises Gly and Ser.

[1317] In some embodiments, the peptide linker comprises an amino acid sequence chosen from SEQ ID NOs: 6214-6217 or 6220-6221 and 77-78.

[1318] In another aspect, the disclosure provides a nucleic acid molecule encoding the multifunctional molecule as described herein.

[1319] In another aspect, the disclosure provides a vector, e.g., an expression vector, comprising the nucleic acid molecule as described herein.

[1320] In another aspect, the disclosure provides a host cell comprising the nucleic acid molecule or a vector as described herein.

[1321] In another aspect, the disclosure provides a method of making, e.g., producing, the multifunctional molecule as described herein, comprising culturing the host cell described herein, under suitable conditions, e.g., conditions suitable for gene expression and/or homo- or heterodimerization.

[1322] In another aspect, the disclosure provides a pharmaceutical composition comprising the multifunctional molecule as described herein and a pharmaceutically acceptable carrier, excipient, or stabilizer.

[1323] In another aspect, the disclosure provides a method of treating a cancer, comprising administering to a subject in need thereof the multifunctional molecule as disclosed herein, wherein the multifunctional molecule is administered in an amount effective to treat the cancer.

[1324] In another aspect, the disclosure provides a use of the multifunctional molecule as described herein in treating a cancer. In another aspect, the disclosure provides a multifunctional molecule disclosed herein for use in treating a cancer.

[1325] In some embodiments, the subject has cancer cells that express the first and/or second calreticulin protein.

[1326] In some embodiments, wherein the subject has the JAK2 V617F mutation.

[1327] In some embodiments, the subject does not have the JAK2 V617F mutation.

[1328] In some embodiments, the subject has an MPL mutation.

[1329] In some embodiments, the subject does not have an MPL mutation.

[1330] In some embodiments, the cancer is a hematological cancer, optionally wherein the cancer is a myeloproliferative neoplasm, e.g., primary or idiopathic myelofibrosis (MF), essential thrombocytosis (ET), polycythemia vera (PV), or chronic myelogenous leukemia (CML), optionally wherein the cancer is myelofibrosis.

[1331] In some embodiments, the cancer is a solid tumor cancer.

[1332] In some embodiments, the method or use further comprises administering a second therapeutic treatment.

[1333] In some embodiments, the second therapeutic treatment comprises a therapeutic agent (e.g., a chemotherapeutic agent, a biologic agent, hormonal therapy), radiation, or surgery.

[1334] In some embodiments, the therapeutic agent is selected from: a chemotherapeutic agent, or a biologic agent.

[1335] In another aspect, the disclosure features a multifunctional molecule (e.g., polypeptide or nucleic acid encoding the same) that includes:
[1336] (i) a first antigen binding domain that binds to a calreticulin protein (e.g., a wild-type or mutant calreticulin protein), and
[1337] (ii) one, two, or all of:
[1338] (a) an immune cell engager chosen from a T cell engager, an NK cell engager, a B cell engager, a dendritic cell engager, or a macrophage cell engager;
[1339] (b) a cytokine molecule;
[1340] (c) a stromal modifying moiety; or
[1341] (d) a tumor-targeting moiety that binds to a tumor antigen, e.g., chosen from: G6B, CD34, CD41, P-selectin, Clec2, cKIT, FLT3, MPL, ITGB3, ITGB2, GP5, GP6, GP9, GP1BA, DSC2, FCGR2A, TNFRSF10A, TNFRSF10B, or TM4SF1.

[1342] In an aspect, the disclosure features a multifunctional molecule (e.g., polypeptide or nucleic acid encoding the same) that includes:
[1343] (i) a first antigen binding domain that binds to a calreticulin protein (e.g., a wild-type or mutant calreticulin protein), and
[1344] (ii) a second antigen binding domain comprising an immune cell engager (e.g., a T cell engager, e.g., an antigen binding domain that binds to TCRβV, e.g., as described herein).

[1345] In an aspect, the disclosure features a multifunctional molecule (e.g., polypeptide or nucleic acid encoding the same) that includes:
[1346] (i) a first antigen binding domain that binds to a calreticulin protein (e.g., a wild-type or mutant calreticulin protein), and
[1347] (ii) a second antigen binding domain comprising a tumor-targeting moiety, e.g., that binds to a tumor antigen chosen from: G6B, CD34, CD41, P-selectin, Clec2, cKIT, FLT3, MPL, ITGB3, ITGB2, GP5, GP6, GP9, GP1BA, DSC2, FCGR2A, TNFRSF10A, TNFRSF10B, or TM4SF1.

[1348] In an aspect, the disclosure features a multifunctional molecule (e.g., polypeptide or nucleic acid encoding the same) that includes:
[1349] (i) a first antigen binding domain that binds to a calreticulin protein (e.g., a wild-type or mutant calreticulin protein),
[1350] (ii) a second antigen binding domain comprising an immune cell engager (e.g., a T cell engager, e.g., an antigen binding domain that binds to TCRβV, e.g., as described herein, e.g., an anti-TCRβV antibody molecule described herein), and
[1351] (iii) a third antigen binding domain comprising a tumor-targeting moiety, e.g., that binds to a tumor antigen chosen from: G6B, CD34, CD41, P-selectin, Clec2, cKIT, FLT3, MPL, ITGB3, ITGB2, GP5, GP6, GP9, GP1BA, DSC2, FCGR2A, TNFRSF10A, TNFRSF10B, or TM4SF1.

[1352] In some embodiments, the multifunctional molecule further comprises a cytokine molecule or a modulator of a cytokine molecule, e.g., a TGF-β inhibitor, e.g., as described herein.

[1353] In some embodiments, the multifunctional molecule further comprises an NK cell engager, e.g., an antigen binding domain that binds to Nkp30, e.g., as described herein.

[1354] In some embodiments, the calreticulin protein (e.g., the wild-type or mutant calreticulin protein) comprises the amino acid sequence of SEQ ID NO: 6285, 1001, or 6286. In some embodiments, the wild type calreticulin protein comprises the amino acid sequence of SEQ ID NO: 6285 or 1001. In some embodiments, the calreticulin mutant protein comprises the amino acid sequence of SEQ ID NO: 6286.

[1355] In some embodiments, the first antigen binding domain comprises a heavy chain variable region (VH) comprising a heavy chain framework region 1 (VHFWR1) amino acid sequence of SEQ ID NO: 6224, a VHFWR2 amino acid sequence of SEQ ID NO: 6226, a VHFWR3 amino acid sequence of SEQ ID NO: 6228, or a VHFWR4 amino acid sequence of SEQ ID NO: 6230. In some embodiments, the first antigen binding domain comprises a heavy chain variable region (VH) comprising a heavy chain framework region 1 (VHFWR1) amino acid sequence of SEQ ID NO: 6232, a VHFWR2 amino acid sequence of SEQ ID NO: 6234, a VHFWR3 amino acid sequence of SEQ ID NO: 6236, or a VHFWR4 amino acid sequence of SEQ ID NO: 6230. In some embodiments, the first antigen binding domain comprises a light chain variable region (VL) comprising a light chain framework region 1 (VLFWR1) amino acid sequence of SEQ ID NO: 6238, a VLFWR2 amino acid sequence of SEQ ID NO: 6240, a VLFWR3 amino acid sequence of SEQ ID NO: 6242, or a VLFWR4 amino acid sequence of SEQ ID NO: 6244.

[1356] In some embodiments, the calreticulin protein (e.g., a wild-type or mutant calreticulin protein) comprises an amino acid sequence chosen from SEQ ID NOs: 6285-6312 or 1001. In some embodiments, the calreticulin protein (e.g., a wild-type or mutant calreticulin protein) comprises an amino acid sequence chosen from SEQ ID NOs: 6313-6346 or 1002-1003. In some embodiments, the calreticulin protein (e.g., a wild-type or mutant calreticulin protein) is a calreticulin protein (e.g., a wild-type or mutant calreticulin protein) disclosed in Table 2 or 3. In some embodiments, the calreticulin protein (e.g., a wild-type or mutant calreticulin protein) comprises the amino acid sequence of SEQ ID NO: 6287. In some embodiments, the calreticulin protein (e.g., a wild-type or mutant calreticulin protein) comprises the amino acid sequence of SEQ ID NO: 6313. In some embodiments, the calreticulin protein (e.g., a wild-type or mutant calreticulin protein) comprises the amino acid sequence of SEQ ID NO: 6288. In some embodiments, the calreticulin protein (e.g., a wild-type or mutant calreticulin protein) comprises the amino acid sequence of SEQ ID NO: 6314.

[1357] In some embodiments, the multifunctional molecule further comprising a second antigen binding domain that preferentially binds to a second calreticulin protein (e.g., a wild-type or mutant calreticulin protein). In some embodiments, the second calreticulin protein (e.g., a wild-type or mutant calreticulin protein) comprises the amino acid sequence of SEQ ID NO: 6286. In some embodiments, the second antigen binding domain is different from the first antigen binding domain. In some embodiments, the second antigen binding domain is the same as the first antigen binding domain. In some embodiments, the second calreticulin protein (e.g., a wild-type or mutant calreticulin protein) comprises an amino acid sequence chosen from SEQ ID NOs: 6287-6312. In some embodiments, the second calreticulin protein (e.g., a wild-type or mutant calreticulin protein) comprises an amino acid sequence chosen from SEQ ID NOs: 6313-6346 or 1002-1003. In some embodiments, the second calreticulin protein (e.g., a wild-type or mutant calreticulin protein) is a calreticulin protein (e.g., a wild-type or mutant calreticulin protein) disclosed in Table 2 or 3. In some embodiments, the second calreticulin protein comprises the amino acid sequence of SEQ ID NO: 6287. In some embodiments, the second calreticulin protein comprises the amino acid sequence of SEQ ID NO: 6313. In some embodiments, the second calreticulin protein comprises the amino acid sequence of SEQ ID NO: 6288. In some embodiments, the second calreticulin protein comprises the amino acid sequence of SEQ ID NO: 6314.

[1358] In some embodiments, the first calreticulin protein (e.g., a wild-type or mutant calreticulin protein) is a Type 1 calreticulin protein (e.g., a wild-type or mutant calreticulin protein), and the second calreticulin protein (e.g., a wild-type or mutant calreticulin protein) is a Type 2 calreticulin protein (e.g., a wild-type or mutant calreticulin protein). In some embodiments, the first calreticulin protein comprises the amino acid sequence of SEQ ID NO: 6287, and the second calreticulin protein the amino acid sequence of SEQ ID NO: 6288. In some embodiments, the first calreticulin protein comprises the amino acid sequence of SEQ ID NO: 6313, and the first calreticulin protein comprises the amino acid sequence of SEQ ID NO: 6314.

[1359] In some embodiments, the wild type calreticulin protein comprises the amino acid sequence of SEQ ID NO: 6285 or 1001.

[1360] In some embodiments, the first antigen binding domain has about the same affinity (e.g., equal affinity) for the first calreticulin protein (e.g., a mutant calreticulin protein) and for a wild-type calreticulin protein.

[1361] In some embodiments, the second antigen binding domain has about the same affinity (e.g., equal affinity) for the second calreticulin protein (e.g., a mutant calreticulin protein) and for a wild-type calreticulin protein.

[1362] In some embodiments, the first antigen binding domain has a higher affinity for a first calreticulin mutant protein than for the wild type calreticulin protein. In some embodiments, the K_{D} for the binding between the first antigen binding domain and the first calreticulin mutant protein is no more than 40%, 30%, 20%, 10%, 1%, 0.1%, or 0.01% of the K_{D} for the binding between the first antigen binding domain and the wild type calreticulin protein. In some embodiments, the first antigen binding domain binds to an epitope located within the C-terminus of the first calreticulin mutant protein. In some embodiments, the first antigen binding domain binds to an epitope located within the amino acid sequence of SEQ ID NO: 6286. In some embodiments, the first antigen binding domain does not bind to the wild type calreticulin protein. In some embodiments, the wild type calreticulin protein comprises the amino acid sequence of SEQ ID NO: 6285 or 1001.

[1363] In some embodiments, the second antigen binding domain has a higher affinity for a second calreticulin mutant protein than for the wild type calreticulin protein. In some embodiments, the K_{D} for the binding between the second antigen binding domain and the second calreticulin mutant protein is no more than 40%, 30%, 20%, 10%, 1%, 0.1%, or 0.01% of the K_{D} for the binding between the second antigen binding domain and the wild type calreticulin protein. In some embodiments, the second antigen binding domain binds to an epitope located within the C-terminus of the second calreticulin mutant protein. In some embodiments, the second antigen binding domain binds to an epitope located within the amino acid sequence of SEQ ID NO: 6286. In some embodiments, the second antigen binding domain does not bind to the wild type calreticulin protein. In some embodiments, the wild type calreticulin protein comprises the amino acid sequence of SEQ ID NO: 6285 or 1001.

[1364] In some embodiments, the multifunctional molecule preferentially binds to a myeloproliferative neoplasm cell over a non-tumor cell. In some embodiments, the binding between the multifunctional molecule and the myeloproliferative neoplasm cell is more than 10, 20, 30, 40, 50-fold greater than the binding between the multifunctional molecule and a non-tumor cell. In some embodiments, the myeloproliferative neoplasm cell is chosen from a myelofibrosis cell, an essential thrombocythemia cell, a polycythemia vera cell, or a chronic myeloid cancer cell. In some embodiments, the myeloproliferative neoplasm cell does not comprise a JAK2 V617F mutation. In some embodiments, the myeloproliferative neoplasm cell does not comprise an MPL mutation.

[1365] In some embodiments, the first and/or second antigen binding domain comprises a heavy chain variable region (VH) comprising a heavy chain complementarity determining region 1 (VHCDR1) amino acid sequence of SEQ ID NO: 6253 (or a sequence with no more than 1, 2, 3, or 4 mutations, e.g., substitutions, additions, or deletions), a VHCDR2 amino acid sequence of SEQ ID NO: 6254 (or a sequence with no more than 1, 2, 3, or 4 mutations, e.g., substitutions, additions, or deletions), and/or a VHCDR3 amino acid sequence of SEQ ID NO: 6255 (or a sequence with no more than 1, 2, 3, or 4 mutations, e.g., substitutions, additions, or deletions). In some embodiments, the first and/or second antigen binding domain comprises a light chain variable region (VL) comprising a light chain complementarity determining region 1 (VLCDR1) amino acid sequence of SEQ ID NO: 6259 (or a sequence with no more than 1, 2, 3, or 4 mutations, e.g., substitutions, additions, or deletions), a VLCDR2 amino acid sequence of SEQ ID NO: 6260 (or a sequence with no more than 1, 2, 3, or 4 mutations, e.g., substitutions, additions, or deletions), and/or a VLCDR3 amino acid sequence of SEQ ID NO: 6261 (or a sequence with no more than 1, 2, 3, or 4 mutations, e.g., substitutions, additions, or deletions).

[1366] In some embodiments, the first and/or second antigen binding domain comprises:
[1367] (i) a heavy chain variable region (VH) comprising a heavy chain complementarity determining region 1 (VHCDR1) amino acid sequence of SEQ ID NO: 6253 (or a sequence with no more than 1, 2, 3, or 4 mutations, e.g., substitutions, additions, or deletions), a VHCDR2 amino acid sequence of SEQ ID NO: 6254 (or a sequence with no more than 1, 2, 3, or 4 mutations, e.g., substitutions, additions, or deletions), and/or a VHCDR3 amino acid sequence of SEQ ID NO: 6255 (or a sequence with no more than 1, 2, 3, or 4 mutations, e.g., substitutions, additions, or deletions), and
[1368] (ii) a light chain variable region (VL) comprising a light chain complementarity determining region 1 (VLCDR1) amino acid sequence of SEQ ID NO: 6259 (or a sequence with no more than 1, 2, 3, or 4 mutations, e.g., substitutions, additions, or deletions), a VLCDR2 amino acid sequence of SEQ ID NO: 6260 (or a sequence with no more than 1, 2, 3, or 4 mutations, e.g., substitutions, additions, or deletions), and/or a VLCDR3 amino acid sequence of SEQ ID NO: 6261 (or a sequence with no more than 1, 2, 3, or 4 mutations, e.g., substitutions, additions, or deletions).

[1369] In some embodiments, the first and/or second antigen binding domain comprises a VH comprising a VHCDR1 amino acid sequence of SEQ ID NO: 6253, a VHCDR2 amino acid sequence of SEQ ID NO: 6254, and a VHCDR3 amino acid sequence of SEQ ID NO: 6255. In some embodiments, the first and/or second antigen binding domain comprises a VL comprising a VLCDR1 amino acid sequence of SEQ ID NO: 6259, a VLCDR2 amino acid sequence of SEQ ID NO: 6260, and a VLCDR3 amino acid sequence of SEQ ID NO: 6261.

[1370] In some embodiments, the first and/or second antigen binding domain comprises:
[1371] (i) a VH comprising a VHCDR1 amino acid sequence of SEQ ID NO: 6253, a VHCDR2 amino acid sequence of SEQ ID NO: 6254, and a VHCDR3 amino acid sequence of SEQ ID NO: 6255, and
[1372] (ii) a VL comprising a VLCDR1 amino acid sequence of SEQ ID NO: 6259, a VLCDR2 amino acid sequence of SEQ ID NO: 6260, and a VLCDR3 amino acid sequence of SEQ ID NO: 6261.

[1373] In some embodiments, the first and/or second antigen binding domain comprises a VH comprising a heavy chain framework region 1 (VHFWR1) amino acid sequence of SEQ ID NO: 6224, a VHFWR2 amino acid sequence of SEQ ID NO: 6226, a VHFWR3 amino acid sequence of SEQ ID NO: 6228, and/or a VHFWR4 amino acid sequence of SEQ ID NO: 6230. In some embodiments, the first and/or second antigen binding domain comprises a VL comprising a light chain framework region 1 (VLFWR1) amino acid sequence of SEQ ID NO: 6238, a VLFWR2 amino acid sequence of SEQ ID NO: 6240, a VLFWR3 amino acid sequence of SEQ ID NO: 6242, and/or a VLFWR4 amino acid sequence of SEQ ID NO: 6244.

[1374] In some embodiments, the first and/or second antigen binding domain comprises:
[1375] (i) a VH comprising a heavy chain framework region 1 (VHFWR1) amino acid sequence of SEQ ID NO: 6224, a VHFWR2 amino acid sequence of SEQ ID NO: 6226, a VHFWR3 amino acid sequence of SEQ ID NO: 6228, and/or a VHFWR4 amino acid sequence of SEQ ID NO: 6230, and
[1376] (ii) a VL comprising a light chain framework region 1 (VLFWR1) amino acid sequence of SEQ ID NO: 6238, a VLFWR2 amino acid sequence of SEQ ID NO: 6240, a VLFWR3 amino acid sequence of SEQ ID NO: 6242, and/or a VLFWR4 amino acid sequence of SEQ ID NO: 6244.

[1377] In some embodiments, the first and/or second antigen binding domain comprises a VH comprising a VHFWR1 amino acid sequence of SEQ ID NO: 6263 (or a sequence with no more than 1, 2, 3, 4, 5, or 6 mutations, e.g., substitutions, additions, or deletions), a VHFWR2 amino acid sequence of SEQ ID NO: 6264 (or a sequence with no more than 1, 2, 3, 4, 5, or 6 mutations, e.g., substitutions, additions, or deletions), a VHFWR3 amino acid sequence of SEQ ID NO: 6265 (or a sequence with no more than 1, 2, 3, 4, 5, 6, 7, 8, 9, 10, or 11 mutations, e.g., substitutions, additions, or deletions), and/or a VHFWR4 amino acid sequence of SEQ ID NO: 228. In some embodiments, the first and/or second antigen binding domain comprises a VL comprising a VLFWR1 amino acid sequence of SEQ ID NO: 6277 (or a sequence with no more than 1, 2, or 3 mutations, e.g., substitutions, additions, or deletions), a VLFWR2 amino acid sequence of SEQ ID NO: 6278 (or a sequence with no more than 1 mutation, e.g., substitution, addition, or deletion), a VLFWR3 amino acid sequence of SEQ ID NO: 6279 (or a sequence with no more than 1 mutation, e.g., substitution, addition, or deletion), and/or a VLFWR4 amino acid sequence of SEQ ID NO: 6280.

[1378] In some embodiments, the first and/or second antigen binding domain comprises:
[1379] (i) a VH comprising a VHFWR1 amino acid sequence of SEQ ID NO: 6263 (or a sequence with no more than 1, 2, 3, 4, 5, or 6 mutations, e.g., substitutions, additions, or deletions), a VHFWR2 amino acid sequence of SEQ ID NO: 6264 (or a sequence with no more than 1, 2, 3, 4, 5, or 6 mutations, e.g., substitutions, additions, or deletions), a VHFWR3 amino acid sequence of SEQ ID NO: 6265 (or a sequence with no more than 1, 2, 3, 4, 5, 6, 7, 8, 9, 10, or 11 mutations, e.g., substitutions, additions, or deletions), and/or a VHFWR4 amino acid sequence of SEQ ID NO: 228, and
[1380] (ii) a VL comprising a VLFWR1 amino acid sequence of SEQ ID NO: 6277 (or a sequence with no more than 1, 2, or 3 mutations, e.g., substitutions, additions, or deletions), a VLFWR2 amino acid sequence of SEQ ID NO: 6278 (or a sequence with no more than 1 mutation, e.g., substitution, addition, or deletion), a VLFWR3 amino acid sequence of SEQ ID NO: 6279 (or a sequence with no more than 1 mutation, e.g., substitution, addition, or deletion), and/or a VLFWR4 amino acid sequence of SEQ ID NO: 6280.

[1381] In some embodiments, the first and/or second antigen binding domain comprises a VH comprising a VHFWR1 amino acid sequence of SEQ ID NO: 6263, a VHFWR2 amino acid sequence of SEQ ID NO: 6264, a VHFWR3 amino acid sequence of SEQ ID NO: 6265, and/or a VHFWR4 amino acid sequence of SEQ ID NO: 228. In some embodiments, the first and/or second antigen binding domain comprises a VL comprising a VLFWR1 amino acid sequence of SEQ ID NO: 6277, a VLFWR2 amino acid sequence of SEQ ID NO: 6278, a VLFWR3 amino acid sequence of SEQ ID NO: 6279, and/or a VLFWR4 amino acid sequence of SEQ ID NO: 6280.

[1382] In some embodiments, the first and/or second antigen binding domain comprises:
[1383] (i) a VH comprising a VHFWR1 amino acid sequence of SEQ ID NO: 6263, a VHFWR2 amino acid sequence of SEQ ID NO: 6264, a VHFWR3 amino acid sequence of SEQ ID NO: 6265, and/or a VHFWR4 amino acid sequence of SEQ ID NO: 228, and
[1384] (ii) a VL comprising a VLFWR1 amino acid sequence of SEQ ID NO: 6277, a VLFWR2 amino acid sequence of SEQ ID NO: 6278, a VLFWR3 amino acid sequence of SEQ ID NO: 6279, and/or a VLFWR4 amino acid sequence of SEQ ID NO: 6280.

[1385] In some embodiments, the first and/or second antigen binding domain comprises a VH comprising the amino acid sequence of SEQ ID NO: 6247 (or an amino acid sequence having at least about 77%, 80%, 85%, 90%, 95%, or 99% sequence identity to SEQ ID NO: 6247). In some embodiments, the first and/or second antigen binding domain comprises a VL comprising the amino acid sequence of SEQ ID NO: 6249 (or an amino acid sequence having at least about 93%, 95%, or 99% sequence identity to SEQ ID NO: 6249).

[1386] In some embodiments, the first and/or second antigen binding domain comprises:
[1387] (i) a VH comprising the amino acid sequence of SEQ ID NO: 6247 (or an amino acid sequence having at least about 77%, 80%, 85%, 90%, 95%, or 99% sequence identity to SEQ ID NO: 6247), and
[1388] (ii) a VL comprising the amino acid sequence of SEQ ID NO: 6249 (or an amino acid sequence having at least about 93%, 95%, or 99% sequence identity to SEQ ID NO: 6249).

[1389] In some embodiments, the first and/or second antigen binding domain comprises a VH comprising the amino acid sequence of SEQ ID NO: 6247. In some embodiments, the first and/or second antigen binding domain comprises a VL comprising the amino acid sequence of SEQ ID NO: 6249. In some embodiments, the first and/or second antigen binding domain comprises (i) a VH comprising the amino acid sequence of SEQ ID NO: 6247, and (ii) a VL comprising the amino acid sequence of SEQ ID NO: 6249.

[1390] In some embodiments, the first and/or second antigen binding domain comprises a VH comprising an amino acid sequence of at least 70% or 75% sequence identity to SEQ ID NO: 6250. In some embodiments, the first and/or second antigen binding domain comprises a VL comprising an amino acid sequence of at least 85% or 90% sequence identity to SEQ ID NO: 6252. In some embodiments, the first and/or second antigen binding domain comprises (i) a VH comprising an amino acid sequence of at least 70% or 75% sequence identity to SEQ ID NO: 6250, and (ii) a VL comprising an amino acid sequence of at least 85% or 90% sequence identity to SEQ ID NO: 6252.

[1391] In some embodiments, the first and/or second antigen binding domain comprises a heavy chain variable region (VH) comprising a heavy chain complementarity determining region 1 (VHCDR1) amino acid sequence of SEQ ID NO: 6256 (or a sequence with no more than 1, 2, 3, or 4 mutations, e.g., substitutions, additions, or deletions), a VHCDR2 amino acid sequence of SEQ ID NO: 6257 (or a sequence with no more than 1, 2, 3, or 4 mutations, e.g., substitutions, additions, or deletions), and/or a VHCDR3 amino acid sequence of SEQ ID NO: 6258 or 116 (or a sequence with no more than 1, 2, 3, or 4 mutations, e.g., substitutions, additions, or deletions). In some embodiments, the first and/or second antigen binding domain comprises a light chain variable region (VL) comprising a light chain complementarity determining region 1 (VLCDR1) amino acid sequence of SEQ ID NO: 6259 (or a sequence with no more than 1, 2, 3, or 4 mutations, e.g., substitutions, additions, or deletions), a VLCDR2 amino acid sequence of SEQ ID NO: 6260 (or a sequence with no more than 1, 2, 3, or 4 mutations, e.g., substitutions, additions, or deletions), and/or a VLCDR3 amino acid sequence of SEQ ID NO: 6261 (or a sequence with no more than 1, 2, 3, or 4 mutations, e.g., substitutions, additions, or deletions).

[1392] In some embodiments, the first and/or second antigen binding domain comprises:
[1393] (i) a heavy chain variable region (VH) comprising a heavy chain complementarity determining region 1 (VHCDR1) amino acid sequence of SEQ ID NO: 6256 (or a sequence with no more than 1, 2, 3, or 4 mutations, e.g., substitutions, additions, or deletions), a VHCDR2 amino acid sequence of SEQ ID NO: 6257 (or a sequence with no more than 1, 2, 3, or 4 mutations, e.g., substitutions, additions, or deletions), and/or a VHCDR3 amino acid sequence of SEQ ID NO: 6258 or 116 (or a sequence with no more than 1, 2, 3, or 4 mutations, e.g., substitutions, additions, or deletions), and
[1394] (ii) a light chain variable region (VL) comprising a light chain complementarity determining region 1 (VLCDR1) amino acid sequence of SEQ ID NO: 6259 (or a sequence with no more than 1, 2, 3, or 4 mutations, e.g., substitutions, additions, or deletions), a VLCDR2 amino acid sequence of SEQ ID NO: 6260 (or a sequence with no more than 1, 2, 3, or 4 mutations, e.g., substitutions, additions, or deletions), and/or a VLCDR3 amino acid sequence of SEQ ID NO: 6261 (or a sequence with no more than 1, 2, 3, or 4 mutations, e.g., substitutions, additions, or deletions).

[1395] In some embodiments, the first and/or second antigen binding domain comprises a VH comprising a heavy chain framework region 1 (VHFWR1) amino acid sequence of SEQ ID NO: 6232, a VHFWR2 amino acid sequence of SEQ ID NO: 6234, a VHFWR3 amino acid sequence of SEQ ID NO: 6236, and/or a VHFWR4 amino acid sequence of SEQ ID NO: 6230. In some embodiments, the first and/or second antigen binding domain comprises a VL comprising a light chain framework region 1 (VLFWR1) amino acid sequence of SEQ ID NO: 6238, a VLFWR2 amino acid sequence of SEQ ID NO: 6240, a VLFWR3 amino acid sequence of SEQ ID NO: 6242, and/or a VLFWR4 amino acid sequence of SEQ ID NO: 6244.

[1396] In some embodiments, the first and/or second antigen binding domain comprises:
[1397] (i) a VH comprising a heavy chain framework region 1 (VHFWR1) amino acid sequence of SEQ ID NO: 6232, a VHFWR2 amino acid sequence of SEQ ID NO: 6234, a VHFWR3 amino acid sequence of SEQ ID NO: 6236, and/or a VHFWR4 amino acid sequence of SEQ ID NO: 6230, and
[1398] (ii) a VL comprising a light chain framework region 1 (VLFWR1) amino acid sequence of SEQ ID NO: 6238, a VLFWR2 amino acid sequence of SEQ ID NO: 6240, a VLFWR3 amino acid sequence of SEQ ID NO: 6242, and/or a VLFWR4 amino acid sequence of SEQ ID NO: 6244.

[1399] In some embodiments, the first and/or second antigen binding domain comprises a VH comprising a heavy chain framework 1 (VHFWR1) amino acid sequence of SEQ ID NO: 6266 (or a sequence with no more than 1, 2, 3, 4, 5, 6, 7, 8, or 9 mutations, e.g., substitutions, additions, or deletions), a VHFWR2 amino acid sequence of SEQ ID NO: 6267 (or a sequence with no more than 1, 2, 3, or 4 mutations, e.g., substitutions, additions, or deletions), a VHFWR3 amino acid sequence of SEQ ID NO: 6268 (or a sequence with no more than 1, 2, 3, 4, 5, 6, 7, 8, 9, 10, or 11 mutations, e.g., substitutions, additions, or deletions), and/or a VHFWR4 amino acid sequence of SEQ ID NO: 6269. In some embodiments, the first and/or second antigen binding domain comprises a VL comprising a VLFWR1 amino acid sequence of SEQ ID NO: 6277 (or a sequence with no more than 1, 2, or 3 mutations, e.g., substitutions, additions, or deletions), a VLFWR2 amino acid sequence of SEQ ID NO: 6278 (or a sequence with no more than 1 mutation, e.g., substitution, addition, or deletion), a VLFWR3 amino acid sequence of SEQ ID NO: 6279 (or a sequence with no more than 1 mutation, e.g., substitution, addition, or deletion), and/or a VLFWR4 amino acid sequence of SEQ ID NO: 6280.

[1400] In some embodiments, the first and/or second antigen binding domain comprises:
[1401] (i) a VH comprising a heavy chain framework 1 (VHFWR1) amino acid sequence of SEQ ID NO: 6266 (or a sequence with no more than 1, 2, 3, 4, 5, 6, 7, 8, or 9 mutations, e.g., substitutions, additions, or deletions), a VHFWR2 amino acid sequence of SEQ ID NO: 6267 (or a sequence with no more than 1, 2, 3, or 4 mutations, e.g., substitutions, additions, or deletions), a VHFWR3 amino acid sequence of SEQ ID NO: 6268 (or a sequence with no more than 1, 2, 3, 4, 5, 6, 7, 8, 9, 10, or 11 mutations, e.g., substitutions, additions, or deletions), and/or a VHFWR4 amino acid sequence of SEQ ID NO: 6269, and
[1402] (ii) a VL comprising a VLFWR1 amino acid sequence of SEQ ID NO: 6277 (or a sequence with no more than 1, 2, or 3 mutations, e.g., substitutions, additions, or deletions), a VLFWR2 amino acid sequence of SEQ ID NO: 6278 (or a sequence with no more than 1 mutation, e.g., substitution, addition, or deletion), a VLFWR3 amino acid sequence of SEQ ID NO: 6279 (or a sequence with no more than 1 mutation, e.g., substitution, addition, or deletion), and/or a VLFWR4 amino acid sequence of SEQ ID NO: 6280.

[1403] In some embodiments, the first and/or second antigen binding domain comprises a VH comprising the amino acid sequence of SEQ ID NO: 6248 (or an amino acid sequence having at least about 75%, 80%, 85%, 90%, 95%, or 99% sequence identity to SEQ ID NO: 6248). In some embodiments, the first and/or second antigen binding domain comprises a VL comprising the amino acid sequence of SEQ ID NO: 6249 (or an amino acid sequence having at least about 93%, 95%, or 99% sequence identity to SEQ ID NO: 6249).

[1404] In some embodiments, the first and/or second antigen binding domain comprises
[1405] (i) a VH comprising the amino acid sequence of SEQ ID NO: 6248 (or an amino acid sequence having at least about 75%, 80%, 85%, 90%, 95%, or 99% sequence identity to SEQ ID NO: 6248), and
[1406] (ii) a VL comprising the amino acid sequence of SEQ ID NO: 6249 (or an amino acid sequence having at least about 93%, 95%, or 99% sequence identity to SEQ ID NO: 6249).

[1407] In some embodiments, the first and/or second antigen binding domain comprises a VH comprising the amino acid sequence of SEQ ID NO: 6248. In some embodiments, the first and/or second antigen binding domain comprises a VL comprising the amino acid sequence of SEQ ID NO: 6249. In some embodiments, the first and/or second antigen binding domain comprises (i) a VH comprising the amino acid sequence of SEQ ID NO: 6248, and (ii) a VL comprising the amino acid sequence of SEQ ID NO: 6249.

[1408] In some embodiments, the first and/or second antigen binding domain comprises a VH comprising an amino acid sequence of at least 70% or 74% sequence identity to SEQ ID NO: 6251. In some embodiments, the first and/or second antigen binding domain comprises a VL comprising an amino acid sequence of at least 85% or 90% sequence identity to SEQ ID NO: 6252. In some embodiments, the first and/or second antigen binding domain comprises (i) a VH comprising an amino acid sequence of at least 70% or 74% sequence identity to SEQ ID NO: 6251, and/or (ii) a VL comprising an amino acid sequence of at least 85% or 90% sequence identity to SEQ ID NO: 6252.

[1409] In some embodiments, the multifunctional molecule comprises an immune cell engager chosen from a T cell engager, an NK cell engager, a B cell engager, a dendritic cell engager, or a macrophage cell engager. In some embodiments, the immune cell engager binds to and activates an immune cell, e.g., an effector cell. In some embodiments, the immune cell engager binds to, but does not activate, an immune cell, e.g., an effector cell.

[1410] In some embodiments, the immune cell engager is a T cell engager, e.g., a T cell engager that mediates binding to and activation of a T cell, or a T cell engager that mediates binding to but not activation of a T cell. In some embodiments, the T cell engager binds to CD3, TCRα, TCRβ, TCRγ, TCRξ, ICOS, CD28, CD27, HVEM, LIGHT, CD40, 4-1BB, OX40, DR3, GITR, CD30, TIM1, SLAM, CD2, or CD226. In some embodiments, the T cell engager is an anti-CD3 antibody molecule. In some embodiments, the T cell engager is an anti-TCRβ antibody molecule, e.g., an anti-TCRβV antibody molecule described herein.

[1411] In some embodiments, the immune cell engager is an NK cell engager, e.g., an NK cell engager that mediates binding to and activation of an NK cell, or an NK cell engager that mediates binding to but not activation of an NK cell. In some embodiments, the NK cell engager is chosen from an antibody molecule, e.g., an antigen binding domain, or ligand that binds to (e.g., activates): NKp30, NKp40, NKp44, NKp46, NKG2D, DNAM1, DAP10, CD16 (e.g., CD16a, CD16b, or both), CRTAM, CD27, PSGL1, CD96, CD100 (SEMA4D), NKp80, CD244 (also known as SLAMF4 or 2B4), SLAMF6, SLAMF7, KIR2DS2, KIR2DS4, KIR3DS1, KIR2DS3, KIR2DS5, KIR2DS1, CD94, NKG2C, NKG2E, or CD160. In some embodiments, the NK cell engager is an antibody molecule or ligand that binds to (e.g., activates) NKp30. In some embodiments, the NK cell engager is an antibody molecule, e.g., an antigen binding domain. In some embodiments, the NK cell engager is an antibody molecule, e.g., an antigen binding domain, that binds to NKp30 or NKp46. In some embodiments, the NK cell engager is a ligand, optionally, the ligand further comprises an immunoglobulin constant region, e.g., an Fc region. In some embodiments, the NK cell engager is a ligand of NKp44 or NKp46, e.g., a viral HA. In some embodiments, the NK cell engager is a ligand of DAP10, e.g., a coreceptor for NKG2D. In some embodiments, the NK cell engager is a ligand of CD16, e.g., a CD16a/b ligand, e.g., a CD16a/b ligand further comprising an antibody Fc region. In some embodiments, the immune cell engager mediates binding to, or activation of, or both of, one or more of a B cell, a macrophage, and/or a dendritic cell.

[1412] In some embodiments, the immune cell engager comprises a B cell, macrophage, and/or dendritic cell engager chosen from one or more of CD40 ligand (CD40L) or a CD70 ligand; an antibody molecule that binds to CD40 or CD70; an antibody molecule to OX40; an OX40 ligand (OX40L); an agonist of a Toll-like receptor (e.g., a TLR4, e.g., a constitutively active TLR4 (caTLR4) or a TLR9 agonist); a 41BB; a CD2 agonist; a CD47; or a STING agonist, or a combination thereof. In some embodiments, the immune cell engager is a B cell engager, e.g., a CD40L, an OX40L, or a CD70 ligand, or an antibody molecule that binds to OX40, CD40 or CD70. In some embodiments, the immune cell engager is a macrophage cell engager, e.g., a CD2 agonist; a CD40L; an OX40L; an antibody molecule that binds to OX40, CD40 or CD70; an agonist of a Toll-like receptor (TLR) (e.g., a TLR4, e.g., a constitutively active TLR4 (caTLR4) or a TLR9 agonist); CD47; or a STING agonist. In some embodiments, the immune cell engager is a dendritic cell engager, e.g., a CD2 agonist, an OX40 antibody, an OX40L, 41BB agonist, a Toll-like receptor agonist or a fragment thereof (e.g., a TLR4, e.g., a constitutively active TLR4 (caTLR4)), CD47 agonist, or a STING agonist. In some embodiments, the STING agonist comprises a cyclic dinucleotide, e.g., a cyclic di-GMP (cdGMP), a cyclic di-AMP (cdAMP), or a combination thereof, optionally with 2′,5′ or 3′,5′ phosphate linkages, e.g., wherein the STING agonist is covalently coupled to the multifunctional molecule.

[1413] In some embodiments, the multifunctional molecule comprises a cytokine molecule or a modulator thereof. In some embodiments, the cytokine molecule is chosen from TGF-β, interleukin-2 (IL-2), interleukin-7 (IL-7), interleukin-12 (IL-12), interleukin-15 (IL-15), interleukin-18 (IL-18), interleukin-21 (IL-21), or interferon gamma, or a fragment or variant thereof, or a combination of any of the aforesaid cytokines. In some embodiments, the cytokine molecule is a monomer or a dimer. In some embodiments, the cytokine molecule further comprises a receptor dimerizing domain, e.g., an IL15Ralpha dimerizing domain. In some embodiments, the cytokine molecule (e.g., IL-15) and the receptor dimerizing domain (e.g., an IL15Ralpha dimerizing domain) are not covalently linked, e.g., are non-covalently associated.

[1414] In some embodiments, the modulator of the cytokine molecule comprises a TGF-β inhibitor.

[1415] In some embodiments, the multifunctional molecule comprises a stromal modifying moiety. In some embodiments, the stromal modifying moiety causes one or more of: decreases the level or production of a stromal or extracellular matrix (ECM) component; decreases tumor fibrosis; increases interstitial tumor transport; improves tumor perfusion; expands the tumor microvasculature; decreases interstitial fluid pressure (IFP) in a tumor; or decreases or enhances penetration or diffusion of an agent, e.g., a cancer therapeutic or a cellular therapy, into a tumor or tumor vasculature. In some embodiments, the stromal or ECM component decreased is chosen from a glycosaminoglycan or an extracellular protein, or a combination thereof. In some embodiments, the glycosaminoglycan is chosen from hyaluronan (also known as hyaluronic acid or HA), chondroitin sulfate, chondroitin, dermatan sulfate, heparan sulfate, heparin, entactin, tenascin, aggrecan or keratin sulfate. In some embodiments, the extracellular protein is chosen from collagen, laminin, elastin, fibrinogen, fibronectin, or vitronectin. In some embodiments, the stromal modifying moiety comprises an enzyme molecule that degrades a tumor stroma or extracellular matrix (ECM). In some embodiments, the enzyme molecule is chosen from a hyaluronidase molecule, a collagenase molecule, a chondroitinase molecule, a matrix metalloproteinase molecule (e.g., macrophage metalloelastase), or a variant (e.g., a fragment) of any of the aforesaid. In some embodiments, the stromal modifying moiety decreases the level or production of hyaluronic acid. In some embodiments, the stromal modifying moiety comprises a hyaluronan degrading enzyme, an agent that inhibits hyaluronan synthesis, or an antibody molecule against hyaluronic acid. In some embodiments, the hyaluronan degrading enzyme is a hyaluronidase molecule or a variant (e.g., fragment thereof) thereof. In some embodiments, the hyaluronan degrading enzyme is active in neutral or acidic pH, e.g., pH of about 4-5. In some embodiments, the hyaluronidase molecule is a mammalian hyaluronidase molecule, e.g., a recombinant human hyaluronidase molecule, or a variant thereof (e.g., a truncated form thereof). In some embodiments, the hyaluronidase molecule is chosen from HYAL1, HYAL2, or PH-20/SPAM1, or a variant thereof (e.g., a truncated form thereof). In some embodiments, the truncated form lacks a C-terminal glycosylphosphatidylinositol (GPI) attachment site or a portion of the GPI attachment site. In some embodiments, the hyaluronidase molecule is glycosylated, e.g., comprises at least one N-linked glycan. In some embodiments, the hyaluronidase molecule comprises the amino acid sequence of SEQ ID NO: 6213, or a fragment thereof, or an amino acid sequence substantially identical thereto (e.g., 95% to 99.9% identical thereto, or having at least one amino acid alteration, but not more than five, ten or fifteen alterations (e.g., substitutions, deletions, or insertions, e.g., conservative substitutions) to the amino acid sequence of SEQ ID NO: 6213). In some embodiments, the hyaluronidase molecule comprises the amino acid residues 36-464 of SEQ ID NO: 6213. In some embodiments, the hyaluronidase molecule comprises the amino acid residues 36-481, 36-482, or 36-483 of PH20, wherein PH20 has the amino acid sequence of SEQ ID NO: 6213. In some embodiments, the hyaluronidase molecule comprises an amino acid sequence having at least 95% to 100% sequence identity to the polypeptide or truncated form of the amino acid sequence of SEQ ID NO: 6213. In some embodiments, the hyaluronidase molecule comprises an amino acid sequence having 30, 20, 10, 5 or fewer amino acid substitutions to the amino acid sequence of SEQ ID NO: 6213. In some embodiments, the hyaluronidase molecule comprises an amino acid sequence at least 95% (e.g., at least 95%, 96%, 97%, 98%, 99%, 100%) identical to the amino acid sequence of SEQ ID NO: 6213. In some embodiments, the hyaluronidase molecule is encoded by a nucleotide sequence at least 95% (e.g., at least 96%, 97%, 98%, 99%, 100%) identical to the nucleotide sequence of SEQ ID NO: 6213. In some embodiments, the hyaluronidase molecule is PH20, e.g., rHuPH20. In some embodiments, the hyaluronidase molecule is HYAL1 and comprises the amino acid sequence of SEQ ID NO: 6218, or a fragment thereof, or an amino acid sequence substantially identical thereto (e.g., 95% to 99.9% identical thereto, or having at least one amino acid alteration, but not more than five, ten or fifteen alterations (e.g., substitutions, deletions, or insertions, e.g., conservative substitutions) to the amino acid sequence of SEQ ID NO: 6218). In some embodiments, the hyaluronan degrading enzyme, e.g., the hyaluronidase molecule, further comprises a polymer, e.g., is conjugated to a polymer, e.g., PEG. In some embodiments, the hyaluronan-degrading enzyme is a PEGylated PH20 enzyme (PEGPH20). In some embodiments, the hyaluronan degrading enzyme, e.g., the hyaluronidase molecule, further comprises an immunoglobulin chain constant region (e.g., Fc region) chosen from, e.g., the heavy chain constant regions of IgG1, IgG2, IgG3, or IgG4, more particularly, the heavy chain constant region of human IgG1, IgG2, IgG3, or IgG4. In some embodiments, the immunoglobulin constant region (e.g., the Fc region) is linked, e.g., covalently linked to, the hyaluronan degrading enzyme, e.g., the hyaluronidase molecule. In some embodiments, the immunoglobulin chain constant region (e.g., Fc region) is altered, e.g., mutated, to increase or decrease one or more of: Fc receptor binding, antibody glycosylation, the number of cysteine residues, effector cell function, or complement function. In some embodiments, the hyaluronan degrading enzyme, e.g., the hyaluronidase molecule, forms a dimer. In some embodiments, the stromal modifying moiety comprises an inhibitor of the synthesis of hyaluronan, e.g., an HA synthase. In some embodiments, the inhibitor comprises a sense or an antisense nucleic acid molecule against an HA synthase or is a small molecule drug. In some embodiments, the inhibitor is 4-methylumbelliferone (MU) or a derivative thereof (e.g., 6,7-dihydroxy-4-methyl coumarin or 5,7-dihydroxy-4-methyl coumarin), or leflunomide or a derivative thereof. In some embodiments, the stromal modifying moiety comprises a collagenase molecule, e.g., a mammalian collagenase molecule, or a variant (e.g., fragment) thereof. In some embodiments, the collagenase molecule is collagenase molecule IV, e.g., comprising the amino acid sequence of SEQ ID NO: 6219, or a fragment thereof, or an amino acid sequence substantially identical thereto (e.g., 95% to 99.9% identical thereto, or having at least one amino acid alteration, but not more than five, ten or fifteen alterations (e.g., substitutions, deletions, or insertions, e.g., conservative substitutions) to the amino acid sequence of SEQ ID NO: 6219.

[1416] In some embodiments, the multifunctional molecule comprises an immune cell engager (e.g., a T cell engager, an NK cell engager, a B cell engager, a dendritic cell engager, or a macrophage cell engager) and a cytokine molecule. In some embodiments, the multifunctional molecule comprises an immune cell engager (e.g., a T cell engager, an NK cell engager, a B cell engager, a dendritic cell engager, or a macrophage cell engager) and a stromal modifying moiety. In some embodiments, the multifunctional molecule comprises a cytokine molecule and a stromal modifying moiety. In some embodiments, the multifunctional molecule comprises an immune cell engager (e.g., a T cell engager, an NK cell engager, a B cell engager, a dendritic cell engager, or a macrophage cell engager), a cytokine molecule, and a stromal modifying moiety.

[1417] In some embodiments, the multifunctional molecule comprises at least two non-contiguous polypeptide chains.

[1418] In some embodiments, the multifunctional molecule comprises the following configuration:
[1419] A, B-[dimerization module]-C, -D
   e.g., the configuration shown in FIGS. 1A, 1B, and 1C, wherein:
   (1) the dimerization module comprises an immunoglobulin constant domain, e.g., a heavy chain constant domain (e.g., a homodimeric or heterodimeric heavy chain constant region, e.g., an Fc region), or a constant domain of an immunoglobulin variable region (e.g., a Fab region); and
   (2) A, B, C, and D are independently absent; (i) an antigen binding domain that binds to a calreticulin protein (e.g., a wild type calreticulin protein or a mutant calreticulin protein), wherein the calreticulin protein comprises the amino acid sequence of SEQ ID NO: 6286; (ii) an immune cell engager chosen from a T cell engager, an NK cell engager, a B cell engager, a dendritic cell engager, or a macrophage cell engager; (iii) a cytokine molecule; or (iv) a stromal modifying moiety, provided that: at least one, two, or three of A, B, C, and D comprises an antigen binding domain that binds to a calreticulin protein (e.g., a wild type calreticulin protein or a calreticulin mutant protein), wherein the calreticulin protein comprises the amino acid sequence of SEQ ID NO: 6286, and any of the remaining A, B, C, and D is absent or comprises one of an immune cell engager, a cytokine molecule, or a stromal modifying moiety.

[1420] In some embodiments,
[1421] (i) A comprises an antigen binding domain that binds to a calreticulin protein (e.g., a wild type calreticulin protein or a calreticulin mutant protein), wherein the calreticulin protein comprises the amino acid sequence of SEQ ID NO: 6286, and B, C, or D comprises an immune cell engager, e.g., a T cell engager, e.g., an anti-CD3 antibody molecule;
[1422] (ii) A comprises an antigen binding domain that binds to a calreticulin protein (e.g., a wild type calreticulin protein or a calreticulin mutant protein), wherein the calreticulin protein comprises the amino acid sequence of SEQ ID NO: 6286, and B, C, or D comprises a cytokine molecule;
[1423] (iii) A comprises an antigen binding domain that binds to a calreticulin protein (e.g., a wild type calreticulin protein or a calreticulin mutant protein), wherein the calreticulin protein comprises the amino acid sequence of SEQ ID NO: 6286, and B, C, or D comprises a stromal modifying moiety;
[1424] (iv) A comprises a first antigen binding domain that binds to a first calreticulin protein (e.g., a wild type calreticulin protein or a calreticulin mutant protein), wherein the first calreticulin protein comprises the amino acid sequence of SEQ ID NO: 6286, B comprises a second antigen binding domain that binds to a second calreticulin protein (e.g., a wild type calreticulin protein or a calreticulin mutant protein), wherein the second calreticulin protein comprises the amino acid sequence of SEQ ID NO: 6286, and C or D comprises an immune cell engager, e.g., a T cell engager, e.g., an anti-CD3 antibody molecule;
[1425] (v) A comprises a first antigen binding domain that binds to a first calreticulin protein (e.g., a wild type calreticulin protein or a calreticulin mutant protein), wherein the first calreticulin protein comprises the amino acid sequence of SEQ ID NO: 6286, B comprises a second antigen binding domain that binds to a second calreticulin protein (e.g., a wild type calreticulin protein or a calreticulin mutant protein), wherein the second calreticulin protein comprises the amino acid sequence of SEQ ID NO: 6286, and C or D comprises a cytokine molecule;
[1426] (vi) A comprises a first antigen binding domain that binds to a first calreticulin protein (e.g., a wild type calreticulin protein or a calreticulin mutant protein), wherein the first calreticulin protein comprises the amino acid sequence of SEQ ID NO: 6286, B comprises a second antigen binding domain that binds to a second calreticulin protein (e.g., a wild type calreticulin protein or a calreticulin mutant protein), wherein the second calreticulin protein comprises the amino acid sequence of SEQ ID NO: 6286, and C or D comprises a stromal modifying moiety;
[1427] (vii) A comprises a first antigen binding domain that binds to a first calreticulin protein (e.g., a wild type calreticulin protein or a calreticulin mutant protein), wherein the first calreticulin protein comprises the amino acid sequence of SEQ ID NO: 6286, C comprises a second antigen binding domain that binds to a second calreticulin protein (e.g., a wild type calreticulin protein or a calreticulin mutant protein), wherein the second calreticulin protein comprises the amino acid sequence of SEQ ID NO: 6286, and B or D comprises an immune cell engager, e.g., a T cell engager, e.g., an anti-CD3 antibody molecule;
[1428] (viii) A comprises a first antigen binding domain that binds to a first calreticulin protein (e.g., a wild type calreticulin protein or a calreticulin mutant protein), wherein the first calreticulin protein comprises the amino acid sequence of SEQ ID NO: 6286, C comprises a second antigen binding domain that binds to a second calreticulin protein (e.g., a wild type calreticulin protein or a calreticulin mutant protein), wherein the second calreticulin protein comprises the amino acid sequence of SEQ ID NO: 6286, and B or D comprises a cytokine molecule;
[1429] (ix) A comprises a first antigen binding domain that binds to a first calreticulin protein (e.g., a wild type calreticulin protein or a calreticulin mutant protein), wherein the first calreticulin protein comprises the amino acid sequence of SEQ ID NO: 6286, C comprises a second antigen binding domain that binds to a second calreticulin protein (e.g., a wild type calreticulin protein or a calreticulin mutant protein), wherein the second calreticulin protein comprises the amino acid sequence of SEQ ID NO: 6286, and B or D comprises a stromal modifying moiety;
[1430] (x) A comprises a first antigen binding domain that binds to a first calreticulin protein (e.g., a wild type calreticulin protein or a calreticulin mutant protein), wherein the first calreticulin protein comprises the amino acid sequence of SEQ ID NO: 6286, and B, C, or D comprises (a) an immune cell engager, e.g., a T cell engager, e.g., an anti-CD3 antibody molecule and (b) a cytokine molecule;
[1431] (xi) A comprises a first antigen binding domain that binds to a first calreticulin protein (e.g., a wild type calreticulin protein or a calreticulin mutant protein), wherein the first calreticulin protein comprises the amino acid sequence of SEQ ID NO: 6286, and B, C, or D comprises (a) an immune cell engager, e.g., a T cell engager, e.g., an anti-CD3 antibody molecule and (b) a stromal modifying moiety;
[1432] (xii) A comprises a first antigen binding domain that binds to a first calreticulin protein (e.g., a wild type calreticulin protein or a calreticulin mutant protein), wherein the first calreticulin protein comprises the amino acid sequence of SEQ ID NO: 6286, and B, C, or D comprises (a) a cytokine molecule and (b) a stromal modifying moiety;
[1433] (xiii) A comprises a first antigen binding domain that binds to a first calreticulin protein (e.g., a wild type calreticulin protein or a calreticulin mutant protein), wherein the first calreticulin protein comprises the amino acid sequence of SEQ ID NO: 6286, B comprises a second antigen binding domain that binds to a second calreticulin protein (e.g., a wild type calreticulin protein or a calreticulin mutant protein), wherein the second calreticulin protein comprises the amino acid sequence of SEQ ID NO: 6286, and C or D comprises (a) an immune cell engager, e.g., a T cell engager, e.g., an anti-CD3 antibody molecule and (b) a cytokine molecule;
[1434] (xiv) A comprises a first antigen binding domain that binds to a first calreticulin protein (e.g., a wild type calreticulin protein or a calreticulin mutant protein), wherein the first calreticulin protein comprises the amino acid sequence of SEQ ID NO: 6286, B comprises a second antigen binding domain that binds to a second calreticulin protein (e.g., a wild type calreticulin protein or a calreticulin mutant protein), wherein the second calreticulin protein comprises the amino acid sequence of SEQ ID NO: 6286, and C or D comprises (a) an immune cell engager, e.g., a T cell engager, e.g., an anti-CD3 antibody molecule and (b) a stromal modifying moiety;
[1435] (xv) A comprises a first antigen binding domain that binds to a first calreticulin protein (e.g., a wild type calreticulin protein or a calreticulin mutant protein), wherein the first calreticulin protein comprises the amino acid sequence of SEQ ID NO: 6286, B comprises a second antigen binding domain that binds to a second calreticulin protein (e.g., a wild type calreticulin protein or a calreticulin mutant protein), wherein the second calreticulin protein comprises the amino acid sequence of SEQ ID NO: 6286, and C or D comprises (a) a cytokine molecule and (b) a stromal modifying moiety;
[1436] (xvi) A comprises a first antigen binding domain that binds to a first calreticulin protein (e.g., a wild type calreticulin protein or a calreticulin mutant protein), wherein the first calreticulin protein comprises the amino acid sequence of SEQ ID NO: 6286, C comprises a second antigen binding domain that binds to a second calreticulin protein (e.g., a wild type calreticulin protein or a calreticulin mutant protein), wherein the second calreticulin protein comprises the amino acid sequence of SEQ ID NO: 6286, and B or D comprises (a) an immune cell engager, e.g., a T cell engager, e.g., an anti-CD3 antibody molecule and (b) a cytokine molecule;
[1437] (xvii) A comprises a first antigen binding domain that binds to a first calreticulin protein (e.g., a wild type calreticulin protein or a calreticulin mutant protein), wherein the first calreticulin protein comprises the amino acid sequence of SEQ ID NO: 6286, C comprises a second antigen binding domain that binds to a second calreticulin protein (e.g., a wild type calreticulin protein or a calreticulin mutant protein), wherein the second calreticulin protein comprises the amino acid sequence of SEQ ID NO: 6286, and B or D comprises (a) an immune cell engager, e.g., a T cell engager, e.g., an anti-CD3 antibody molecule and (b) a stromal modifying moiety;
[1438] (xviii) A comprises a first antigen binding domain that binds to a first calreticulin protein (e.g., a wild type calreticulin protein or a calreticulin mutant protein), wherein the first calreticulin protein comprises the amino acid sequence of SEQ ID NO: 6286, C comprises a second antigen binding domain that binds to a second calreticulin protein (e.g., a wild type calreticulin protein or a calreticulin mutant protein), wherein the second calreticulin protein comprises the amino acid sequence of SEQ ID NO: 6286, and B or D comprises (a) a cytokine molecule and (b) a stromal modifying moiety;
[1439] (xix) A comprises a first antigen binding domain that binds to a first calreticulin protein (e.g., a wild type calreticulin protein or a calreticulin mutant protein), wherein the first calreticulin protein comprises the amino acid sequence of SEQ ID NO: 6286, and B, C, or D comprises (a) an immune cell engager, e.g., a T cell engager, e.g., an anti-CD3 antibody molecule, (b) a cytokine molecule, and (c) a stromal modifying moiety;
[1440] (xx) A comprises a first antigen binding domain that binds to a first calreticulin protein (e.g., a wild type calreticulin protein or a calreticulin mutant protein), wherein the first calreticulin protein comprises the amino acid sequence of SEQ ID NO: 6286, B comprises a second antigen binding domain that binds to a second calreticulin protein (e.g., a wild type calreticulin protein or a calreticulin mutant protein), wherein the second calreticulin protein comprises the amino acid sequence of SEQ ID NO: 6286, and C or D comprises (a) an immune cell engager, e.g., a T cell engager, e.g., an anti-CD3 antibody molecule, (b) a cytokine molecule, and (c) a stromal modifying moiety; or
[1441] (xxi) A comprises a first antigen binding domain that binds to a first calreticulin protein (e.g., a wild type calreticulin protein or a calreticulin mutant protein), wherein the first calreticulin protein comprises the amino acid sequence of SEQ ID NO: 6286, C comprises a second antigen binding domain that binds to a second calreticulin protein (e.g., a wild type calreticulin protein or a calreticulin mutant protein), wherein the second calreticulin protein comprises the amino acid sequence of SEQ ID NO: 6286, and B or D comprises (a) an immune cell engager, e.g., a T cell engager, e.g., an anti-CD3 antibody molecule, (b) a cytokine molecule, and (c) a stromal modifying moiety.

[1442] In some embodiments, the dimerization module comprises one or more immunoglobulin chain constant regions (e.g., Fc regions) comprising one or more of: a paired cavity-protuberance (“knob-in-a hole”), an electrostatic interaction, or a strand-exchange. In some embodiments, the one or more immunoglobulin chain constant regions (e.g., Fc regions) comprise an amino acid substitution at a position chosen from one or more of 347, 349, 350, 351, 366, 368, 370, 392, 394, 395, 397, 398, 399, 405, 407, or 409, e.g., of the Fc region of human IgG1. In some embodiments, the one or more immunoglobulin chain constant regions (e.g., Fc regions) comprise an amino acid substitution chosen from: T366S, L368A, or Y407V (e.g., corresponding to a cavity or hole), or T366W (e.g., corresponding to a protuberance or knob), or a combination thereof.

[1443] In some embodiments, the multifunctional molecule further comprises a linker, e.g., a linker between one or more of: the antigen binding domain and the immune cell engager, the antigen binding domain and the cytokine molecule, the antigen binding domain and the stromal modifying moiety, the immune cell engager and the cytokine molecule, the immune cell engager and the stromal modifying moiety, the cytokine molecule and the stromal modifying moiety, the antigen binding domain and the dimerization module, the immune cell engager and the dimerization module, the cytokine molecule and the dimerization module, or the stromal modifying moiety and the dimerization module. In some embodiments, the linker is chosen from: a cleavable linker, a non-cleavable linker, a peptide linker, a flexible linker, a rigid linker, a helical linker, or a non-helical linker. In some embodiments, the linker is a peptide linker. In some embodiments, the peptide linker comprises Gly and Ser. In some embodiments, the peptide linker comprises an amino acid sequence chosen from SEQ ID NOs: 6214-6217 or 6220-6221 and 77-78.

[1444] In one aspect, the invention provides a multifunctional molecule, comprising:
[1445] (i) an antigen binding domain that binds to a calreticulin protein (e.g., a wild type calreticulin protein or a calreticulin mutant protein), e.g., wherein the calreticulin mutant protein comprises the amino acid sequence of SEQ ID NO: 6286, and
[1446] (ii) a moiety that binds to CD3, e.g., an antibody molecule that binds to CD3.

[1447] In some embodiments, the multifunctional molecule comprises: a first polypeptide comprising, e.g., from N-terminus to C-terminus, a first VL and a first CL, a second polypeptide comprising, e.g., from N-terminus to C-terminus, a first VH, a first CH1, a first dimerization domain (e.g., a first Fc), and a first moiety that binds to CD3 (e.g., a first scFv that binds to CD3),
[1448] a third polypeptide comprising, e.g., from N-terminus to C-terminus, a second VH, a second CH1, a second dimerization domain (e.g., a second Fc), and optionally a second moiety that binds to CD3 (e.g., a second scFv that binds to CD3),
[1449] a fourth polypeptide comprising, e.g., from N-terminus to C-terminus, a second VL and a second CL, wherein:
[1450] the first VL and the first VH form a first antigen binding domain that binds to a first calreticulin protein (e.g., a wild-type calreticulin protein or a calreticulin mutant protein), and the second VL and the second VH form a second antigen binding domain that binds to a second calreticulin protein (e.g., a wild-type calreticulin protein or a calreticulin mutant protein), wherein the first and second calreticulin proteins comprise the amino acid sequence of SEQ ID NO: 6286, optionally wherein the first and second calreticulin proteins are each independently chosen from: a molecule comprising the amino acid sequence of SEQ ID NO: 6313, or a molecule comprising the amino acid sequence of SEQ ID NO: 6314.

[1451] In some embodiments, the multifunctional molecule comprises the configuration of FIG. 2A or 2B.

[1452] In one aspect, the invention provides a multifunctional molecule, comprising:
[1453] (i) an antigen binding domain that binds to a calreticulin protein (e.g., a wild type calreticulin protein or a calreticulin mutant protein), e.g., wherein the calreticulin mutant protein comprises the amino acid sequence of SEQ ID NO: 6286, and
[1454] (ii) a moiety that binds to TCR (e.g., TCRβ), e.g., an antibody molecule that binds to TCR (e.g., TCRβ).

[1455] In some embodiments, the multifunctional molecule comprises: a first polypeptide comprising, e.g., from N-terminus to C-terminus, a first VL and a first CL, a second polypeptide comprising, e.g., from N-terminus to C-terminus, a first VH, a first CH1, a first dimerization domain (e.g., a first Fc), and a first moiety that binds to TCR (e.g., TCRβ) (e.g., a first scFv that binds to TCR (e.g., TCRβ)),
[1456] a third polypeptide comprising, e.g., from N-terminus to C-terminus, a second VH, a second CH1, a second dimerization domain (e.g., a second Fc), and optionally a second moiety that binds to TCR (e.g., TCRβ) (e.g., a second scFv that binds to TCR (e.g., TCRβ)), a fourth polypeptide comprising, e.g., from N-terminus to C-terminus, a second VL and a second CL, wherein:
[1457] the first VL and the first VH form a first antigen binding domain that binds to a first calreticulin protein (e.g., a wild-type calreticulin protein or a calreticulin mutant protein), and the second VL and the second VH form a second antigen binding domain that binds to a second calreticulin protein (e.g., a wild-type calreticulin protein or a calreticulin mutant protein), wherein the first and second calreticulin proteins comprise the amino acid sequence of SEQ ID NO: 6286, optionally wherein the first and second calreticulin proteins are each independently chosen from: a molecule comprising the amino acid sequence of SEQ ID NO: 6313, or a molecule comprising the amino acid sequence of SEQ ID NO: 6314.

[1458] In some embodiments, the multifunctional molecule comprises the configuration of FIG. 3A or 3B.

[1459] In one aspect, the invention provides a multifunctional molecule, comprising:
[1460] (i) an antigen binding domain that binds to a calreticulin protein (e.g., a wild-type calreticulin protein or a calreticulin mutant protein), e.g., wherein the calreticulin protein comprises the amino acid sequence of SEQ ID NO: 6286, and
[1461] (ii) a moiety that binds to NKp30, e.g., an antibody molecule or ligand that binds to (e.g., activates) NKp30.

[1462] In some embodiments, the multifunctional molecule comprises:
[1463] a first polypeptide comprising, e.g., from N-terminus to C-terminus, a first VL and a first CL, a second polypeptide comprising, e.g., from N-terminus to C-terminus, a first VH, a first CH1, a first dimerization domain (e.g., a first Fc), and a first moiety that binds to NKp30 (e.g., a first antibody molecule or ligand that binds to NKp30),
[1464] a third polypeptide comprising, e.g., from N-terminus to C-terminus, a second VH, a second CH1, a second dimerization domain (e.g., a second Fc), and optionally a second moiety that binds to NKp30 (e.g., a second antibody molecule or ligand that binds to NKp30), a fourth polypeptide comprising, e.g., from N-terminus to C-terminus, a second VL and a second CL, wherein:
[1465] the first VL and the first VH form a first antigen binding domain that binds to a first calreticulin protein (e.g., a wild-type calreticulin protein or a calreticulin mutant protein), and the second VL and the second VH form a second antigen binding domain that binds to a second calreticulin protein (e.g., a wild-type calreticulin protein or a calreticulin mutant protein), wherein the first and second calreticulin proteins comprise the amino acid sequence of SEQ ID NO: 6286, optionally wherein the first and second calreticulin proteins are each independently chosen from: a molecule comprising the amino acid sequence of SEQ ID NO: 6313, or a molecule comprising the amino acid sequence of SEQ ID NO: 6314.

[1466] In some embodiments, the multifunctional molecule comprises the configuration of FIG. 4A or 4B.

[1467] In another aspect, the disclosure provides an isolated nucleic acid molecule encoding any multispecific or multifunctional molecule described herein. In another aspect, the disclosure provides an isolated nucleic acid molecule, which comprises the nucleotide sequence encoding any of the multispecific or multifunctional molecules described herein, or a nucleotide sequence substantially homologous thereto (e.g., at least 80%, 90%, 95%, or 99.9% identical thereto). In another aspect, the disclosure provides a host cell comprising a nucleic acid molecule or a vector described herein.

[1468] In another aspect, the disclosure provides a method of making, e.g., producing, a multispecific or multifunctional molecule polypeptide described herein, comprising culturing a host cell described herein, under suitable conditions, e.g., conditions suitable for gene expression and/or homo- or heterodimerization.

[1469] In another aspect, the disclosure provides a pharmaceutical composition comprising a multispecific or multifunctional molecule polypeptide described herein and a pharmaceutically acceptable carrier, excipient, or stabilizer.

[1470] In another aspect, the disclosure provides a method of treating a cancer, comprising administering to a subject in need thereof a multispecific or multifunctional molecule polypeptide described herein, wherein the multispecific antibody is administered in an amount effective to treat the cancer. In some embodiments, the subject has cancer cells that express the first and/or second calreticulin mutant. In some embodiments, the subject has tumor cells that express the first, second, or third tumor antigen, e.g., the subject has tumor cells that express a tumor antigen chosen from G6B, CD34, CD41, P-selectin, Clec2, cKIT, FLT3, MPL, ITGB3, ITGB2, GP5, GP6, GP9, GP1BA, DSC2, FCGR2A, TNFRSF10A, TNFRSF10B, or TM4SF1. In some embodiments, the subject has the JAK2 V617F mutation. In some embodiments, the subject does not have the JAK2 V617F mutation. In some embodiments, the subject has a MPL mutation. In some embodiments, the subject does not have a MPL mutation. In some embodiments, the cancer is a hematological cancer, optionally wherein the cancer is a myeloproliferative neoplasm, e.g., primary or idiopathic myelofibrosis (MF), essential thrombocytosis (ET), polycythemia vera (PV), or chronic myelogenous leukemia (CML). In some embodiments, the cancer is myelofibrosis. In some embodiments, the cancer is a solid tumor cancer. In some embodiments, the solid tumor cancer is one or more of pancreatic (e.g., pancreatic adenocarcinoma), breast, colorectal, lung (e.g., small or non-small cell lung cancer), skin, ovarian, or liver cancer.

[1471] In some embodiments, the cancer cell comprises a myeloproliferative neoplasm cell. In some embodiments, the myeloproliferative neoplasm cell is chosen from a myelofibrosis cell, an essential thrombocythemia cell, a polycythemia vera cell, or a chronic myeloid cancer cell. In some embodiments, the myeloproliferative neoplasm cell is a myelofibrosis cell. In some embodiments, the myeloproliferative neoplasm cell is an essential thrombocythemia cell. In some embodiments, the myeloproliferative neoplasm cell is a polycythemia vera cell. In some embodiments, the myeloproliferative neoplasm cell is a chronic myeloid cancer cell. In some embodiments, the myeloproliferative neoplasm cell comprises a JAK2 mutation (e.g., a JAK2 V617F mutation). In some embodiments, the myeloproliferative neoplasm cell comprises a calreticulin mutation. In some embodiments, the myeloproliferative neoplasm cell comprises a MPL mutation.

[1472] In some embodiments, the method further comprises administering a second therapeutic treatment. In some embodiments, second therapeutic treatment comprises a therapeutic agent (e.g., a chemotherapeutic agent, a biologic agent, hormonal therapy), radiation, or surgery. In some embodiments, therapeutic agent is selected from: a chemotherapeutic agent, or a biologic agent.

### Exemplary Embodiment 2

[1473] 1. A multifunctional molecule comprising:
[1474] (i) a first antigen binding domain that binds to a calreticulin protein (e.g., a wild-type or mutant calreticulin protein), e.g., a calreticulin-targeting antigen binding domain disclosed in any one of Table 4, Table 5, Table 6, Table 24, Table 25, Table 16, Table 17, Table 18, or Table 19, and
[1475] (ii) a second antigen binding domain that binds to TCRβV, e.g., an anti-TCRβV antigen binding domain disclosed in any one of Table 30, Table 31, Table 32, Table 33, Table 11, Table 12, or Table 13, or a second antigen binding domain that binds to NKp30, e.g., an anti-NKp30 antigen binding domain disclosed in Table 7, Table 8, Table 35, Table 36, Table 9, Table 10, or Table 34.

[1476] 2. The multifunctional molecule of embodiment 1, wherein the second antigen binding domain binds to TCRβV.

[1477] 3. The multifunctional molecule of embodiment 2, wherein the second antigen binding domain activates a T cell or the second antigen binding domain does not activate a T cell.

[1478] 4. The multifunctional molecule of embodiment 2 or 3, wherein the second antigen binding domain binds to TCRβ V12 or TCRβ V6 (e.g., comprising the amino acid sequence of SEQ ID NO: 1044).

[1479] 5. The multifunctional molecule of any of embodiments 2-4, wherein the second antigen binding domain comprises one or more amino acid sequences as listed in Table 30, Table 31, Table 32, Table 33, Table 11, Table 12, or Table 13.

[1480] 6. The multifunctional molecule of any of embodiments 2-5, wherein the second antigen binding domain comprises:
[1481] (a) a heavy chain variable region (VH) and/or a light chain variable region (VL), wherein:
[1482] (i) the VH comprises a heavy chain complementarity determining region 1 (VHCDR1) having an amino acid sequence of a VHCDR1 in Table 30, Table 31, Table 33, Table 11, Table 12, or Table 13 (or a sequence with no more than 1, 2, 3, or 4 mutations, e.g., substitutions, additions, or deletions), a VHCDR2 having an amino acid sequence of a VHCDR2 in Table 30, Table 31, Table 33, Table 11, Table 12, or Table 13 (or a sequence with no more than 1, 2, 3, or 4 mutations, e.g., substitutions, additions, or deletions), and/or a VHCDR3 having an amino acid sequence of a VHCDR3 in Table 30, Table 31, Table 33, Table 11, Table 12, or Table 13 (or a sequence with no more than 1, 2, 3, or 4 mutations, e.g., substitutions, additions, or deletions),
[1483] (ii) the VL comprises a light chain complementarity determining region 1 (VLCDR1) having an amino acid sequence of a VLCDR1 in Table 30, Table 31, Table 33, Table 11, Table 12, or Table 13 (or a sequence with no more than 1, 2, 3, or 4 mutations, e.g., substitutions, additions, or deletions), a VLCDR2 having an amino acid sequence of a VLCDR2 in Table 30, Table 31, Table 33, Table 11, Table 12, or Table 13 (or a sequence with no more than 1, 2, 3, or 4 mutations, e.g., substitutions, additions, or deletions), and/or a VLCDR3 having an amino acid sequence of a VLCDR3 in Table 30, Table 31, Table 33, Table 11, Table 12, or Table 13 (or a sequence with no more than 1, 2, 3, or 4 mutations, e.g., substitutions, additions, or deletions);
[1484] (b) a heavy chain variable region (VH) and/or a light chain variable region (VL), wherein:
[1485] (i) the VH comprises a heavy chain complementarity determining region 1 (VHCDR1) amino acid sequence of SEQ ID NO: 3 (or a sequence with no more than 1, 2, 3, or 4 mutations, e.g., substitutions, additions, or deletions), a VHCDR2 amino acid sequence of SEQ ID NO: 4 (or a sequence with no more than 1, 2, 3, or 4 mutations, e.g., substitutions, additions, or deletions), and/or a VHCDR3 amino acid sequence of SEQ ID NO: 5 (or a sequence with no more than 1, 2, 3, or 4 mutations, e.g., substitutions, additions, or deletions), and/or
[1486] (ii) the VL comprises a light chain complementarity determining region 1 (VHCDR1) amino acid sequence of SEQ ID NO: 6 (or a sequence with no more than 1, 2, 3, or 4 mutations, e.g., substitutions, additions, or deletions), a VHCDR2 amino acid sequence of SEQ ID NO: 7 (or a sequence with no more than 1, 2, 3, or 4 mutations, e.g., substitutions, additions, or deletions), and/or a VHCDR3 amino acid sequence of SEQ ID NO: 8 (or a sequence with no more than 1, 2, 3, or 4 mutations, e.g., substitutions, additions, or deletions);
[1487] (c) a heavy chain variable region (VH) and/or a light chain variable region (VL), wherein:
[1488] (i) the VH comprises a heavy chain complementarity determining region 1 (VHCDR1) amino acid sequence of SEQ ID NO: 45 (or a sequence with no more than 1, 2, 3, or 4 mutations, e.g., substitutions, additions, or deletions), a VHCDR2 amino acid sequence of SEQ ID NO: 46 (or a sequence with no more than 1, 2, 3, or 4 mutations, e.g., substitutions, additions, or deletions), and/or a VHCDR3 amino acid sequence of SEQ ID NO: 47 (or a sequence with no more than 1, 2, 3, or 4 mutations, e.g., substitutions, additions, or deletions), and/or
[1489] (ii) the VL comprises a light chain complementarity determining region 1 (VHCDR1) amino acid sequence of SEQ ID NO: 51 (or a sequence with no more than 1, 2, 3, or 4 mutations, e.g., substitutions, additions, or deletions), a VHCDR2 amino acid sequence of SEQ ID NO: 52 (or a sequence with no more than 1, 2, 3, or 4 mutations, e.g., substitutions, additions, or deletions), and/or a VHCDR3 amino acid sequence of SEQ ID NO: 53 (or a sequence with no more than 1, 2, 3, or 4 mutations, e.g., substitutions, additions, or deletions); and/or
[1490] (d) a heavy chain variable region (VH) and/or a light chain variable region (VL), wherein:
[1491] (i) the VH comprises a heavy chain complementarity determining region 1 (VHCDR1) amino acid sequence of SEQ ID NO: 48 (or a sequence with no more than 1, 2, 3, or 4 mutations, e.g., substitutions, additions, or deletions), a VHCDR2 amino acid sequence of SEQ ID NO: 49 (or a sequence with no more than 1, 2, 3, or 4 mutations, e.g., substitutions, additions, or deletions), and/or a VHCDR3 amino acid sequence of SEQ ID NO: 50 (or a sequence with no more than 1, 2, 3, or 4 mutations, e.g., substitutions, additions, or deletions), and/or
[1492] (ii) the VL comprises a light chain complementarity determining region 1 (VHCDR1) amino acid sequence of SEQ ID NO: 54 (or a sequence with no more than 1, 2, 3, or 4 mutations, e.g., substitutions, additions, or deletions), a VHCDR2 amino acid sequence of SEQ ID NO: 55 (or a sequence with no more than 1, 2, 3, or 4 mutations, e.g., substitutions, additions, or deletions), and/or a VHCDR3 amino acid sequence of SEQ ID NO: 56 (or a sequence with no more than 1, 2, 3, or 4 mutations, e.g., substitutions, additions, or deletions).

[1493] 7. The multifunctional molecule of any of embodiments 2-5, wherein the second antigen binding domain comprises:
[1494] (a) a heavy chain variable region (VH) and/or a light chain variable region (VL), wherein:
[1495] (i) the VH comprises the amino acid sequence of a VH in Table 30, Table 31, Table 33, Table 11, Table 12, or Table 13 (or an amino acid sequence having at least about 77%, 80%, 85%, 90%, 95%, or 99% sequence identity thereto), and/or
[1496] (ii) the VL comprises the amino acid sequence of a VL in Table 30, Table 31, Table 33, Table 11, Table 12, or Table 13 (or an amino acid sequence having at least about 77%, 80%, 85%, 90%, 95%, or 99% sequence identity thereto)
[1497] (iii) the VH comprises the amino acid sequence of SEQ ID NO: 9 (or an amino acid sequence having at least about 77%, 80%, 85%, 90%, 95%, or 99% sequence identity thereto), and/or
[1498] (iv) the VL comprises the amino acid sequence of SEQ ID NO: 10 (or an amino acid sequence having at least about 77%, 80%, 85%, 90%, 95%, or 99% sequence identity thereto);
[1499] (b) a heavy chain variable region (VH) and/or a light chain variable region (VL), wherein:
[1500] (i) the VH comprises the amino acid sequence of SEQ ID NO: 9 (or an amino acid sequence having at least about 77%, 80%, 85%, 90%, 95%, or 99% sequence identity thereto), and/or
[1501] (ii) the VL comprises the amino acid sequence of SEQ ID NO: 11 (or an amino acid sequence having at least about 77%, 80%, 85%, 90%, 95%, or 99% sequence identity thereto); and/or
[1502] (c) a heavy chain variable region (VH) and/or a light chain variable region (VL), wherein:
[1503] (i) the VH comprises the amino acid sequence of SEQ ID NO: 1312 (or an amino acid sequence having at least about 77%, 80%, 85%, 90%, 95%, or 99% sequence identity thereto), and/or
[1504] (ii) the VL comprises the amino acid sequence of SEQ ID NO: 1314 (or an amino acid sequence having at least about 77%, 80%, 85%, 90%, 95%, or 99% sequence identity thereto).

[1505] 8. The multifunctional molecule of any of embodiments 2-5, wherein the second antigen binding domain comprises:
[1506] (a) a heavy chain variable region (VH) and/or a light chain variable region (VL), wherein:
[1507] (i) the VH comprises a heavy chain complementarity determining region 1 (VHCDR1) amino acid sequence of SEQ ID NO: 17 (or a sequence with no more than 1, 2, 3, or 4 mutations, e.g., substitutions, additions, or deletions), a VHCDR2 amino acid sequence of SEQ ID NO: 18 (or a sequence with no more than 1, 2, 3, or 4 mutations, e.g., substitutions, additions, or deletions), and/or a VHCDR3 amino acid sequence of SEQ ID NO: 19 (or a sequence with no more than 1, 2, 3, or 4 mutations, e.g., substitutions, additions, or deletions), and/or
[1508] (ii) the VL comprises a light chain complementarity determining region 1 (VHCDR1) amino acid sequence of SEQ ID NO: 20 (or a sequence with no more than 1, 2, 3, or 4 mutations, e.g., substitutions, additions, or deletions), a VHCDR2 amino acid sequence of SEQ ID NO: 21 (or a sequence with no more than 1, 2, 3, or 4 mutations, e.g., substitutions, additions, or deletions), and/or a VHCDR3 amino acid sequence of SEQ ID NO: 22 (or a sequence with no more than 1, 2, 3, or 4 mutations, e.g., substitutions, additions, or deletions);
[1509] (b) a heavy chain variable region (VH) and/or a light chain variable region (VL), wherein:
[1510] (i) the VH comprises a heavy chain complementarity determining region 1 (VHCDR1) amino acid sequence of SEQ ID NO: 57 (or a sequence with no more than 1, 2, 3, or 4 mutations, e.g., substitutions, additions, or deletions), a VHCDR2 amino acid sequence of SEQ ID NO: 58 (or a sequence with no more than 1, 2, 3, or 4 mutations, e.g., substitutions, additions, or deletions), and/or a VHCDR3 amino acid sequence of SEQ ID NO: 59 (or a sequence with no more than 1, 2, 3, or 4 mutations, e.g., substitutions, additions, or deletions), and/or
[1511] (ii) the VL comprises a light chain complementarity determining region 1 (VHCDR1) amino acid sequence of SEQ ID NO: 63 (or a sequence with no more than 1, 2, 3, or 4 mutations, e.g., substitutions, additions, or deletions), a VHCDR2 amino acid sequence of SEQ ID NO: 64 (or a sequence with no more than 1, 2, 3, or 4 mutations, e.g., substitutions, additions, or deletions), and/or a VHCDR3 amino acid sequence of SEQ ID NO: 65 (or a sequence with no more than 1, 2, 3, or 4 mutations, e.g., substitutions, additions, or deletions); and/or
[1512] (c) a heavy chain variable region (VH) and/or a light chain variable region (VL), wherein:
[1513] (i) the VH comprises a heavy chain complementarity determining region 1 (VHCDR1) amino acid sequence of SEQ ID NO: 60 (or a sequence with no more than 1, 2, 3, or 4 mutations, e.g., substitutions, additions, or deletions), a VHCDR2 amino acid sequence of SEQ ID NO: 61 (or a sequence with no more than 1, 2, 3, or 4 mutations, e.g., substitutions, additions, or deletions), and/or a VHCDR3 amino acid sequence of SEQ ID NO: 62 (or a sequence with no more than 1, 2, 3, or 4 mutations, e.g., substitutions, additions, or deletions), and/or
[1514] (ii) the VL comprises a light chain complementarity determining region 1 (VHCDR1) amino acid sequence of SEQ ID NO: 66 (or a sequence with no more than 1, 2, 3, or 4 mutations, e.g., substitutions, additions, or deletions), a VHCDR2 amino acid sequence of SEQ ID NO: 67 (or a sequence with no more than 1, 2, 3, or 4 mutations, e.g., substitutions, additions, or deletions), and/or a VHCDR3 amino acid sequence of SEQ ID NO: 68 (or a sequence with no more than 1, 2, 3, or 4 mutations, e.g., substitutions, additions, or deletions).

[1515] 9. The multifunctional molecule of any of embodiments 2-5, wherein the second antigen binding domain comprises:
[1516] (a) a heavy chain variable region (VH) and/or a light chain variable region (VL), wherein:
[1517] (i) the VH comprises the amino acid sequence of SEQ ID NO: 15 (or an amino acid sequence having at least about 77%, 80%, 85%, 90%, 95%, or 99% sequence identity thereto), and/or
[1518] (ii) the VL comprises the amino acid sequence of SEQ ID NO: 16 (or an amino acid sequence having at least about 77%, 80%, 85%, 90%, 95%, or 99% sequence identity thereto); and/or
[1519] (b) a heavy chain variable region (VH) and/or a light chain variable region (VL), wherein:
[1520] (i) the VH comprises: the amino acid sequence of SEQ ID NO: 23 (or an amino acid sequence having at least about 77%, 80%, 85%, 90%, 95%, or 99% sequence identity thereto), the amino acid sequence of SEQ ID NO: 24 (or an amino acid sequence having at least about 77%, 80%, 85%, 90%, 95%, or 99% sequence identity thereto), or the amino acid sequence of SEQ ID NO: 25 (or an amino acid sequence having at least about 77%, 80%, 85%, 90%, 95%, or 99% sequence identity thereto); and/or
[1521] (ii) the VL comprises:
[1522] the amino acid sequence of SEQ ID NO: 26 (or an amino acid sequence having at least about 77%, 80%, 85%, 90%, 95%, or 99% sequence identity thereto),
[1523] the amino acid sequence of SEQ ID NO: 27 (or an amino acid sequence having at least about 77%, 80%, 85%, 90%, 95%, or 99% sequence identity thereto),
[1524] the amino acid sequence of SEQ ID NO: 28 (or an amino acid sequence having at least about 77%, 80%, 85%, 90%, 95%, or 99% sequence identity thereto),
[1525] the amino acid sequence of SEQ ID NO: 29 (or an amino acid sequence having at least about 77%, 80%, 85%, 90%, 95%, or 99% sequence identity thereto), or
[1526] the amino acid sequence of SEQ ID NO: 30 (or an amino acid sequence having at least about 77%, 80%, 85%, 90%, 95%, or 99% sequence identity thereto).

[1527] 10. The multifunctional molecule of any of embodiments 2-9, comprising:
[1528] a first polypeptide comprising, e.g., from N-terminus to C-terminus, a first VL and a first CL, a second polypeptide comprising, e.g., from N-terminus to C-terminus, a first VH, a first CH1, a first dimerization domain (e.g., a first Fc), and a first moiety that binds to TCR (e.g., TCRVβ) (e.g., a first scFv that binds to TCR (e.g., TCRVβ)),
[1529] a third polypeptide comprising, e.g., from N-terminus to C-terminus, a second VH, a second CH1, a second dimerization domain (e.g., a second Fc), and optionally a second moiety that binds to TCR (e.g., TCRVβ) (e.g., a second scFv that binds to TCR (e.g., TCRVβ)),
[1530] a fourth polypeptide comprising, e.g., from N-terminus to C-terminus, a second VL and a second CL, wherein:
[1531] the first VL and the first VH form a first antigen binding domain that binds to a first calreticulin protein, and the second VL and the second VH form a third antigen binding domain that binds to a second calreticulin protein,
[1532] optionally wherein the first and second calreticulin proteins comprise the amino acid sequence of SEQ ID NO: 6285, 1001, or 6286,
[1533] optionally wherein the first and second calreticulin mutant proteins are each independently chosen from: a molecule comprising the amino acid sequence of SEQ ID NO: 6313, or a molecule comprising the amino acid sequence of SEQ ID NO: 6314, optionally wherein the multifunctional molecule comprises the configuration of FIG. 3A or 3B.

[1534] 11. The multifunctional molecule of embodiment 1, wherein the second antigen binding domain binds to NKp30.

[1535] 12. The multifunctional molecule of embodiment 11, wherein the second antigen binding domain is chosen from an antibody molecule, e.g., an antigen binding domain, or ligand that binds to (e.g., activates) NKp30, e.g., the second antigen binding domain is an antibody molecule or ligand that binds to (e.g., activates) NKp30.

[1536] 13. The multifunctional molecule of embodiment 11 or 12, wherein the second antigen binding domain comprises:
[1537] (i) a heavy chain variable region (VH) comprising a heavy chain complementarity determining region 1 (VHCDR1) having an amino acid sequence of a VHCDR1 of Table 7, Table 35, Table 9, Table 10, or Table 34 (or a sequence with no more than 1, 2, 3, or 4 mutations, e.g., substitutions, additions, or deletions), a VHCDR2 having an amino acid sequence of a VHCDR2 of Table 7, Table 35, Table 9, Table 10, or Table 34 (or a sequence with no more than 1, 2, 3, or 4 mutations, e.g., substitutions, additions, or deletions), and/or a VHCDR3 having an amino acid sequence of a VHCDR3 of Table 7, Table 35, Table 9, Table 10, or Table 34 (or a sequence with no more than 1, 2, 3, or 4 mutations, e.g., substitutions, additions, or deletions), and/or
[1538] (ii) a light chain variable region (VL) comprising a light chain complementarity determining region 1 (VLCDR1) having an amino acid sequence of a VLCDR1 of Table 8, Table 36, Table 9, Table 10, or Table 34 (or a sequence with no more than 1, 2, 3, or 4 mutations, e.g., substitutions, additions, or deletions), a VLCDR2 having an amino acid sequence of a VLCDR2 of Table 8, Table 36, Table 9, Table 10, or Table 34 (or a sequence with no more than 1, 2, 3, or 4 mutations, e.g., substitutions, additions, or deletions), and/or a VLCDR3 having an amino acid sequence of a VLCDR3 of Table 8, Table 36, Table 9, Table 10, or Table 34 (or a sequence with no more than 1, 2, 3, or 4 mutations, e.g., substitutions, additions, or deletions).

[1539] 14. The multifunctional molecule of embodiment 13, wherein the second antigen binding domain comprises:
[1540] (i) a heavy chain variable region (VH) comprising a heavy chain complementarity determining region 1 (VHCDR1) amino acid sequence of SEQ ID NO: 7313 (or a sequence with no more than 1, 2, 3, or 4 mutations, e.g., substitutions, additions, or deletions), a VHCDR2 amino acid sequence of SEQ ID NO: 6001 (or a sequence with no more than 1, 2, 3, or 4 mutations, e.g., substitutions, additions, or deletions, and/or a VHCDR3 amino acid sequence of SEQ ID NO: 7315 (or a sequence with no more than 1, 2, 3, or 4 mutations, e.g., substitutions, additions, or deletions; and/or
[1541] (ii) a light chain variable region (VL) comprising a light chain complementarity determining region 1 (VLCDR1) amino acid sequence of SEQ ID NO: 7326 (or a sequence with no more than 1, 2, 3, or 4 mutations, e.g., substitutions, additions, or deletions), a VLCDR2 amino acid sequence of SEQ ID NO: 7327 (or a sequence with no more than 1, 2, 3, or 4 mutations, e.g., substitutions, additions, or deletions), and/or a VLCDR3 amino acid sequence of SEQ ID NO: 7329 (or a sequence with no more than 1, 2, 3, or 4 mutations, e.g., substitutions, additions, or deletions).

[1542] 15. The multifunctional molecule of embodiment 13 or 14, wherein the second antigen binding domain comprises:
[1543] (i) a VH comprising the amino acid sequence of any of SEQ ID NOs: 7298 or 7300-7304 (or an amino acid sequence having at least about 75%, 80%, 85%, 90%, 95%, or 99% sequence identity to any of SEQ ID NOs: 7298 or 7300-7304); and/or
[1544] (ii) a VL comprising the amino acid sequence of any of SEQ ID NOs: 7299 or 7305-7309 (or an amino acid sequence having at least about 93%, 95%, or 99% sequence identity to any of SEQ ID NOs: 7299 or 7305-7309).

[1545] 16. The multifunctional molecule of any of embodiments 13-15, wherein the second antigen binding domain comprises:
[1546] (i) a VH comprising the amino acid sequence of SEQ ID NO: 7302 (or an amino acid sequence having at least about 75%, 80%, 85%, 90%, 95%, or 99% sequence identity to 7302), and a VL comprising the amino acid sequence of SEQ ID NO: 7305 (or an amino acid sequence having at least about 75%, 80%, 85%, 90%, 95%, or 99% sequence identity to 7305); or
[1547] (ii) a VH comprising the amino acid sequence of SEQ ID NO: 7302 (or an amino acid sequence having at least about 75%, 80%, 85%, 90%, 95%, or 99% sequence identity to 7302), and a VL comprising the amino acid sequence of SEQ ID NO: 7309 (or an amino acid sequence having at least about 75%, 80%, 85%, 90%, 95%, or 99% sequence identity to 7309).

[1548] 17. The multifunctional molecule of any of embodiments 13-16, wherein the second antigen binding domain comprises:
[1549] (i) an amino acid sequence of SEQ ID NO: 7310 (or an amino acid sequence having at least about 75%, 80%, 85%, 90%, 95%, or 99% sequence identity to 7310); or
[1550] (ii) an amino acid sequence of SEQ ID NO: 7311 (or an amino acid sequence having at least about 75%, 80%, 85%, 90%, 95%, or 99% sequence identity to 7311).

[1551] 18. The multifunctional molecule of embodiment 11 or 12, wherein the second antigen binding domain comprises:
[1552] (i) a heavy chain variable region (VH) comprising a heavy chain complementarity determining region 1 (VHCDR1) amino acid sequence of SEQ ID NO: 6000, a VHCDR2 amino acid sequence of SEQ ID NO: 6001, and/or a VHCDR3 amino acid sequence of SEQ ID NO: 6002, and
[1553] (ii) a light chain variable region (VL) comprising a light chain complementarity determining region 1 (VLCDR1) amino acid sequence of SEQ ID NO: 6063, a VLCDR2 amino acid sequence of SEQ ID NO: 6064, and/or a VLCDR3 amino acid sequence of SEQ ID NO: 7293.

[1554] 19. The multifunctional molecule of any of embodiments 11, 12, or 18, wherein the second antigen binding domain comprises:
[1555] (1) a heavy chain variable region (VH) comprising a heavy chain framework region 1 (VHFWR1) having an amino acid sequence of a VHFWR1 of Table 7, Table 35, Table 9, Table 10, or Table 34 (or a sequence with no more than 1, 2, 3, 4, 5, or 6 mutations, e.g., substitutions, additions, or deletions, therefrom), a VHFWR2 having an amino acid sequence of a VHFWR2 of Table 7, Table 35, Table 9, Table 10, or Table 34 (or a sequence with no more than 1, 2, 3, 4, 5, or 6 mutations, e.g., substitutions, additions, or deletions, therefrom), a VHFWR3 having an amino acid sequence of a VHFWR3 of Table 7, Table 35, Table 9, Table 10, or Table 34 (or a sequence with no more than 1, 2, 3, 4, 5, or 6 mutations, e.g., substitutions, additions, or deletions, therefrom), or a VHFWR4 having an amino acid sequence of a VHFWR4 of Table 7, Table 35, Table 9, Table 10, or Table 34 (or a sequence with no more than 1, 2, 3, 4, 5, or 6 mutations, e.g., substitutions, additions, or deletions, therefrom), and/or
[1556] (2) a light chain variable region (VL) comprising a light chain framework region 1 (VLFWR1) having an amino acid sequence of a VLFWR1 of Table 8, Table 36, Table 9, Table 10, or Table 34 (or a sequence with no more than 1, 2, 3, 4, 5, or 6 mutations, e.g., substitutions, additions, or deletions, therefrom), a VLFWR2 having an amino acid sequence of a VLFWR2 of Table 8, Table 36, Table 9, Table 10, or Table 34 (or a sequence with no more than 1, 2, 3, 4, 5, or 6 mutations, e.g., substitutions, additions, or deletions, therefrom), a VLFWR3 having an amino acid sequence of a VLFWR3 of Table 8, Table 36, Table 9, Table 10, or Table 34 (or a sequence with no more than 1, 2, 3, 4, 5, or 6 mutations, e.g., substitutions, additions, or deletions, therefrom), or a VLFWR4 having an amino acid sequence of a VLFWR4 of Table 8, Table 36, Table 9, Table 10, or Table 34 (or a sequence with no more than 1, 2, 3, 4, 5, or 6 mutations, e.g., substitutions, additions, or deletions, therefrom).

[1557] 20. The multifunctional molecule of embodiment 19, wherein the second antigen binding domain comprises:
[1558] (1) a heavy chain variable region (VH) comprising a heavy chain framework region 1 (VHFWR1) amino acid sequence of SEQ ID NO: 6003, a VHFWR2 amino acid sequence of SEQ ID NO: 6004, a VHFWR3 amino acid sequence of SEQ ID NO: 6005, or a VHFWR4 amino acid sequence of SEQ ID NO: 6006, and
[1559] (3) a light chain variable region (VL) comprising a light chain framework region 1 (VLFWR1) amino acid sequence of SEQ ID NO: 6066, a VLFWR2 amino acid sequence of SEQ ID NO: 6067, a VLFWR3 amino acid sequence of SEQ ID NO: 7292, or a VLFWR4 amino acid sequence of SEQ ID NO: 6069.

[1560] 21. The multifunctional molecule of any one of embodiments 11, 12, or 18-20, wherein the second antigen binding domain comprises:
[1561] (i) a VH comprising the amino acid sequence of a VH of Table 7, Table 35, Table 9, Table 10, or Table 34 (or an amino acid sequence having at least about 75%, 80%, 85%, 90%, 95%, or 99% sequence identity thereto), and/or
[1562] (ii) a VL comprising the amino acid sequence of a VL of Table 8, Table 36, Table 9, Table 10, or Table 34 (or an amino acid sequence having at least about 93%, 95%, or 99% sequence identity thereto).

[1563] 22. The multifunctional molecule of either of embodiments 11, 12, or 18-21, wherein the second antigen binding domain comprises a heavy chain comprising the amino acid sequence of a heavy chain of Table 10 (or an amino acid sequence having at least about 75%, 80%, 85%, 90%, 95%, or 99% sequence identity thereto).

[1564] 23. The multifunctional molecule of either of embodiments 11, 12, or 18-22, wherein the second antigen binding domain comprises a light chain comprising the amino acid sequence of a light chain of Table 10 (or an amino acid sequence having at least about 75%, 80%, 85%, 90%, 95%, or 99% sequence identity thereto).

[1565] 24. The multifunctional molecule of either of embodiments 11, 12, or 18-23, wherein the second antigen binding domain comprises a heavy chain comprising the amino acid sequence of a heavy chain of Table 10 (or an amino acid sequence having at least about 75%, 80%, 85%, 90%, 95%, or 99% sequence identity thereto), and a light chain comprising the amino acid sequence of a light chain of Table 10 (or an amino acid sequence having at least about 75%, 80%, 85%, 90%, 95%, or 99% sequence identity thereto).

[1566] 25. The multifunctional molecule of any of embodiments 11-24, comprising:
[1567] a first polypeptide comprising, e.g., from N-terminus to C-terminus, a first VL and a first CL, a second polypeptide comprising, e.g., from N-terminus to C-terminus, a first VH, a first CH1, a first dimerization domain (e.g., a first Fc), and a first moiety that binds to NKp30 (e.g., a first antibody molecule or ligand that binds to NKp30),
[1568] a third polypeptide comprising, e.g., from N-terminus to C-terminus, a second VH, a second CH1, a second dimerization domain (e.g., a second Fc), and optionally a second moiety that binds to NKp30 (e.g., a second antibody molecule or ligand that binds to NKp30),
[1569] a fourth polypeptide comprising, e.g., from N-terminus to C-terminus, a second VL and a second CL, wherein:
[1570] the first VL and the first VH form a first antigen binding domain that binds to a first calreticulin protein, and the second VL and the second VH from a third antigen binding domain that binds to a second calreticulin protein,
[1571] optionally wherein the first and second calreticulin proteins comprise the amino acid sequence of SEQ ID NO: 6285, 1001, or 6286,
[1572] optionally wherein the first and second calreticulin mutant proteins are each independently chosen from: a molecule comprising the amino acid sequence of SEQ ID NO: 6313, or a molecule comprising the amino acid sequence of SEQ ID NO: 6314, optionally wherein the multifunctional molecule comprises the configuration of FIG. 3A or 3B.

[1573] 26. The multifunctional molecule of any of the preceding embodiments, wherein the calreticulin protein comprises an amino acid sequence chosen from SEQ ID NOs: 6285-6312 or 1001, optionally wherein the calreticulin protein comprises an amino acid sequence chosen from SEQ ID NOs: 6313-6346 or 1002-1003.

[1574] 27. The multifunctional molecule of any of the preceding embodiments, wherein the calreticulin protein comprises the amino acid sequence of SEQ ID NO: 6285 or 1001.

[1575] 28. The multifunctional molecule of any of the preceding embodiments, wherein the calreticulin protein comprises the amino acid sequence of SEQ ID NO: 6286.

[1576] 29. The multifunctional molecule of any of the preceding embodiments, wherein the first antigen binding domain binds to an epitope located within the C-terminus of the calreticulin protein, optionally wherein the first antigen binding domain binds to an epitope located within the amino acid sequence of SEQ ID NO: 6285, 1001, or 6286.

[1577] 30. The multifunctional molecule of any of the preceding embodiments, further comprising a third antigen binding domain that binds to a second calreticulin protein, e.g., wherein the second calreticulin mutant protein comprises the amino acid sequence of SEQ ID NO: 6285, 1001, or 6286, optionally wherein:
[1578] (i) the third antigen binding domain is different from the first antigen binding domain, or
[1579] (ii) the third antigen binding domain is the same as the first antigen binding domain.

[1580] 31. The multifunctional molecule of embodiment 30, wherein the second calreticulin molecule is the same as the calreticulin molecule bound by the first antigen binding domain.

[1581] 32. The multifunctional molecule of embodiment 30, wherein the second calreticulin molecule is different from the calreticulin molecule bound by the first antigen binding domain.

[1582] 33. The multifunctional molecule of any of embodiments 30-32, wherein the second calreticulin protein comprises an amino acid sequence chosen from SEQ ID NOs: 6285-6312 or 1001, optionally wherein the second calreticulin protein comprises an amino acid sequence chosen from SEQ ID NOs: 6313-6346 or 1002-1003.

[1583] 34. The multifunctional molecule of embodiment 33, wherein the calreticulin protein bound by the first antigen binding domain comprises the amino acid sequence of SEQ ID NO: 6285 or 1001, and the second calreticulin protein comprises the amino acid sequence of SEQ ID NO: 6286.

[1584] 35. The multifunctional molecule of any of embodiments 30-34, wherein the third antigen binding domain binds to an epitope located within the C-terminus of the second calreticulin protein, optionally wherein the third antigen binding domain binds to an epitope located within the amino acid sequence of SEQ ID NO: 6285, 1001, or 6286.

[1585] 36. The multifunctional molecule of any of the preceding embodiments, wherein the first antigen binding domain comprises:
[1586] (i) a heavy chain variable region (VH) comprising a heavy chain complementarity determining region 1 (VHCDR1) having an amino acid sequence of a VHCDR1 in Table 4, Table 24, Table 25, or Table 17 (or a sequence with no more than 1, 2, 3, or 4 mutations, e.g., substitutions, additions, or deletions), a VHCDR2 having an amino acid sequence of a VHCDR2 in Table 4, Table 24, Table 25, or Table 17 (or a sequence with no more than 1, 2, 3, or 4 mutations, e.g., substitutions, additions, or deletions), and/or a VHCDR3 having an amino acid sequence of a VHCDR3 in Table 4, Table 24, Table 25, or Table 17 (or a sequence with no more than 1, 2, 3, or 4 mutations, e.g., substitutions, additions, or deletions);
[1587] (ii) a light chain variable region (VL) comprising a light chain complementarity determining region 1 (VHCDR1) having an amino acid sequence of a VLCDR1 in Table 5, Table 24, Table 25, or Table 18 (or a sequence with no more than 1, 2, 3, or 4 mutations, e.g., substitutions, additions, or deletions), a VHCDR2 having an amino acid sequence of a VLCDR2 in Table 5, Table 24, Table 25, or Table 18 (or a sequence with no more than 1, 2, 3, or 4 mutations, e.g., substitutions, additions, or deletions), and/or a VHCDR3 having an amino acid sequence of a VLCDR3 in Table 5, Table 24, Table 25, or Table 18 (or a sequence with no more than 1, 2, 3, or 4 mutations, e.g., substitutions, additions, or deletions);
[1588] (iii) a VH comprising the amino acid sequence of a VH in Table 24, Table 25, or Table 16 (or an amino acid sequence having at least about 77%, 80%, 85%, 90%, 95%, or 99% sequence identity thereto);
[1589] (iv) a VL comprising the amino acid sequence of a VL in Table 24, Table 25, or Table 16 (or an amino acid sequence having at least about 93%, 95%, or 99% sequence identity thereto);
[1590] (v) a VH comprising a heavy chain framework region 1 (VHFWR1) having an amino acid sequence of a VHFWR1 in Table 4 or Table 6 (or a sequence with no more than 1, 2, 3, 4, 5, 6, 7, 8, or 9 mutations, e.g., substitutions, additions, or deletions), a VHFWR2 having an amino acid sequence of a VHFWR2 in Table 4 or Table 6 (or a sequence with no more than 1, 2, 3, 4, 5, 6, 7, 8, or 9 mutations, e.g., substitutions, additions, or deletions), a VHFWR3 having an amino acid sequence of a VHFWR3 in Table 4 or Table 6 (or a sequence with no more than 1, 2, 3, 4, 5, 6, 7, 8, or 9 mutations, e.g., substitutions, additions, or deletions), and/or a VHFWR4 having an amino acid sequence of a VHFWR4 in Table 4 or Table 6 (or a sequence with no more than 1, 2, 3, 4, 5, 6, 7, 8, or 9 mutations, e.g., substitutions, additions, or deletions), and/or
[1591] (vi) a VL comprising a light chain framework region 1 (VLFWR1) having an amino acid sequence of a VLFWR1 in Table 5 or Table 6 (or a sequence with no more than 1, 2, 3, 4, 5, 6, 7, 8, or 9 mutations, e.g., substitutions, additions, or deletions), a VLFWR2 having an amino acid sequence of a VLFWR2 in Table 5 or Table 6 (or a sequence with no more than 1, 2, 3, 4, 5, 6, 7, 8, or 9 mutations, e.g., substitutions, additions, or deletions), a VLFWR3 having an amino acid sequence of a VLFWR3 in Table 5 or Table 6 (or a sequence with no more than 1, 2, 3, 4, 5, 6, 7, 8, or 9 mutations, e.g., substitutions, additions, or deletions), and/or a VLFWR4 having an amino acid sequence of a VLFWR4 in Table 5 or Table 6 (or a sequence with no more than 1, 2, 3, 4, 5, 6, 7, 8, or 9 mutations, e.g., substitutions, additions, or deletions).

[1592] 37. The multifunctional molecule of any of the preceding embodiments, wherein the multifunctional molecule further comprises a tumor-targeting moiety.

[1593] 38. The multifunctional molecule of embodiment 37, wherein the tumor-targeting moiety binds to a tumor antigen.

[1594] 39. The multifunctional molecule of embodiment 38, wherein the tumor antigen is selected from G6B, CD34, CD41, P-selectin, Clec2, cKIT, FLT3, MPL, ITGB3, ITGB2, GP5, GP6, GP9, GP1BA, DSC2, FCGR2A, TNFRSF10A, TNFRSF10B, or TM4SF1.

[1595] 40. The multifunctional molecule of embodiment 37, wherein the tumor-targeting moiety comprises an antibody molecule, e.g., that binds to a tumor antigen selected from G6B, CD34, CD41, P-selectin, Clec2, cKIT, FLT3, MPL, ITGB3, ITGB2, GP5, GP6, GP9, GP1BA, DSC2, FCGR2A, TNFRSF10A, TNFRSF10B, or TM4SF1.

[1596] 41. The multifunctional molecule of embodiment 40, wherein the tumor-targeting moiety comprises a VH and/or VL sequence, e.g., as listed in Table 38 or Table 20.

[1597] 42. The multifunctional molecule of any one of the preceding embodiments, wherein the multifunctional molecule preferentially binds to a myeloproliferative neoplasm cell over a non-tumor cell, optionally wherein the binding between the multifunctional molecule and the myeloproliferative neoplasm cell is more than 10, 20, 30, 40, 50-fold greater than the binding between the multifunctional molecule and a non-tumor cell.

[1598] 43. The multifunctional molecule of embodiment 42, wherein the myeloproliferative neoplasm cell is chosen from a myelofibrosis cell, an essential thrombocythemia cell, a polycythemia vera cell, or a chronic myeloid cancer cell, optionally wherein: the myeloproliferative neoplasm cell does not comprise a JAK2 V617F mutation, or the myeloproliferative neoplasm cell does not comprise a MPL mutation.

[1599] 44. The multifunctional molecule of any one of the preceding embodiments, further comprising a linker, e.g., a linker between the first antigen binding domain and the second antigen binding domain.

[1600] 45. The multifunctional molecule of embodiment 44, wherein the linker is chosen from: a cleavable linker, a non-cleavable linker, a peptide linker, a flexible linker, a rigid linker, a helical linker, or a non-helical linker.

[1601] 46. The multifunctional molecule of embodiment 44 or 45, wherein the linker is a peptide linker.

[1602] 47. The multifunctional molecule of 46, wherein the peptide linker comprises Gly and Ser.

[1603] 48. The multifunctional molecule of 46, wherein the peptide linker comprises an amino acid sequence chosen from SEQ ID NOs: 6214-6217 or 6220-6221 and 77-78.

[1604] 49. A nucleic acid molecule encoding the multifunctional molecule of any of the preceding embodiments.

[1605] 50. A vector, e.g., an expression vector, comprising the nucleic acid molecule of embodiment 49.

[1606] 51. A cell comprising the nucleic acid molecule of embodiment 49 or the vector of embodiment 50.

[1607] 52. A method of making, e.g., producing, the multifunctional molecule of any one of embodiments 1-48, comprising culturing the cell of embodiment 51, under suitable conditions, e.g., conditions suitable for gene expression and/or homo- or heterodimerization.

[1608] 53. A pharmaceutical composition comprising the multifunctional molecule of any one of embodiments 1-48 and a pharmaceutically acceptable carrier, excipient, or stabilizer.

[1609] 54. A method of treating a cancer, comprising administering to a subject in need thereof the multifunctional molecule of any one of embodiments 1-48, wherein the multifunctional molecule is administered in an amount effective to treat the cancer.

[1610] 55. Use of the multifunctional molecule of any one of embodiments 1-48 for the manufacture of a medicament for treating a cancer.

[1611] 56. The method of embodiment 54 or the use of embodiment 55, wherein the subject has cancer cells that express the first and/or second calreticulin protein.

[1612] 57. The method of embodiment 54 or 56 or the use of embodiment 55 or 56, wherein the subject has the JAK2 V617F mutation.

[1613] 58. The method of embodiment 54 or 56 or the use of embodiment 55 or 56, wherein the subject does not have the JAK2 V617F mutation.

[1614] 59. The method of any one of embodiments 54 or 56-58 or the use of any one of embodiments 55-58, wherein the subject has a MPL mutation.

[1615] 60. The method of any one of embodiments 54 or 56-58 or the use of any one of embodiments 55-58, wherein the subject does not have a MPL mutation.

[1616] 61. The method of any one of embodiments 54 or 56-60 or the use of any one of embodiments 55-60, wherein the cancer is a hematological cancer, optionally wherein the cancer is a myeloproliferative neoplasm, e.g., primary or idiopathic myelofibrosis (MF), essential thrombocytosis (ET), polycythemia vera (PV), or chronic myelogenous leukemia (CML), optionally wherein the cancer is myelofibrosis.

[1617] 62. The method of any one of embodiments 54 or 56-60 or the use of any one of embodiments 55-60, the cancer is a solid tumor cancer.

[1618] 63. The method of any of embodiments 54 or 56-62 or the use of any one of embodiments 55-62, further comprising administering a second therapeutic treatment.

[1619] 64. The method of embodiment 63 or the use of embodiment 63, wherein the second therapeutic treatment comprises a therapeutic agent (e.g., a chemotherapeutic agent, a biologic agent, hormonal therapy), radiation, or surgery.

[1620] 65. The method of embodiment 64 or the use of embodiment 64, wherein the therapeutic agent is selected from: a chemotherapeutic agent, or a biologic agent.

[1621] 66. A method of detecting calreticulin (e.g., wild-type and/or mutant calreticulin) in a sample or subject, comprising: contacting the sample or subject with an anti-calreticulin (e.g., wild-type and/or mutant calreticulin) antibody molecule described herein; and detecting formation of a complex between the antibody molecule and the sample or subject, thereby detecting calreticulin (e.g., wild-type and/or mutant calreticulin).

[1622] 67. The method of embodiment 66, wherein calreticulin (e.g., wild-type and/or mutant calreticulin) is detected in vitro or in vivo.

[1623] 68. The method of embodiment 66 or 67, further comprising contacting a reference sample or subject with the antibody molecule; and detecting formation of a complex between the antibody molecule and the reference sample or subject, wherein a change, e.g., a statistically significant change, in the formation of the complex in the sample or subject, relative to the reference sample or subject is indicative of the presence of calreticulin (e.g., wild-type and/or mutant calreticulin) in the sample or subject.

[1624] 69. The method of any of embodiments 66-68, further comprising obtaining a sample from a subject.

[1625] 70. The method of any of embodiment 66-69, wherein sample comprises one or more of plasma, tissue (e.g., cancerous tissue), biopsy, blood (e.g., whole blood), PBMCs, bone marrow, and/or lymphatic tissue, e.g., lymph node.

[1626] 71. The method of any of embodiments 66-70, wherein the sample has not been frozen and/or fixed.

[1627] 72. The method of any of embodiments 66-70, wherein the sample has been frozen (e.g., snap frozen) and/or fixed (e.g., formalin-fixed paraffin-embedded (FFPE)).

[1628] 73. The method of any of embodiments 66-72, wherein the subject has, or is at risk of having, a disease or disorder described herein (e.g., cancer, e.g., myelofibrosis).

[1629] 74. The method of any of embodiments 66-73, further comprising performing a flow analysis, e.g., using a multi-panel method.

[1630] 75. The method of any of embodiments 66-74, further comprising assessing T-cell clonality, e.g., to determine the presence and/or level of T cell malignancy.

[1631] 76. The method of any of embodiments 66-75, further comprising measuring the level of calreticulin+(e.g., wild-type calreticulin+ and/or mutant calreticulin+) cells from the biological sample (e.g., determining if the calreticulin+ cells are depleted, e.g., relative to a reference sample or subject).

[1632] 77. The method of any of embodiments 66-76, further comprising measuring the intracellular level of calreticulin (e.g., wild-type and/or mutant calreticulin).

[1633] 78. The method of any of embodiments 66-77, further comprising measuring the membrane level of calreticulin (e.g., wild-type and/or mutant calreticulin).

[1634] 79. The method of any of embodiments 66-78, further comprising evaluating the subject for a change in prognosis, severity, or presence or absence of a disease or disorder (e.g., cancer, e.g., myelofibrosis), e.g., after treatment (e.g., with an antibody molecule described herein).

[1635] 80. The method of any of embodiments 66-79, wherein the antibody molecule is detectably labeled.

[1636] 81. A method of evaluating a subject, comprising: contacting a sample (e.g., a sample described herein) from the subject with an anti-calreticulin (e.g., wild-type and/or mutant calreticulin) antibody molecule described herein; and detecting formation of a complex between the antibody molecule and the sample, thereby evaluating the subject.

[1637] 82. The method of embodiment 81, wherein the subject has, or is at risk of having, a disease or disorder described herein (e.g., cancer, e.g., myelofibrosis).

[1638] 83. The method of embodiment 81 or 82, wherein the subject has not been treated with an antibody molecule described herein.

[1639] 84. The method of embodiment 81 or 82, wherein the subject has been treated with an antibody molecule described herein.

[1640] 85. A kit comprising an anti-calreticulin (e.g., wild-type and/or mutant calreticulin) antibody molecule described herein and instructions for use in a method of detecting calreticulin (e.g., wild-type and/or mutant calreticulin) in a sample or subject.

1.-135. (canceled)

136. A composition comprising a multifunctional molecule comprising:
(a) a first antigen binding domain that binds to a wild-type or a mutant calreticulin protein, wherein the first antigen binding domain comprises:
(i) a heavy chain variable region (VH) comprising a heavy chain complementarity determining region 1 (VHCDR1), a heavy chain complementarity determining region 2 (VHCDR2), and a heavy chain complementarity determining region 3 (VHCDR3), and
(ii) a light chain variable region (VL) comprising a light chain complementarity determining region 1 (VLCDR1), a light chain complementarity determining region 2 (VLCDR2), and a light chain complementarity determining region 3 (VLCDR3), and
(b) a second antigen binding domain that binds to T cell receptor beta chain variable domain (TCRβV) or NKp30, wherein the second antigen binding domain comprises:
(iii) a heavy chain variable region (VH) comprising a heavy chain complementarity determining region 1 (VHCDR1), a heavy chain complementarity determining region 2 (VHCDR2), and a heavy chain complementarity determining region 3 (VHCDR3), and
(iv) a light chain variable region (VL) comprising a light chain complementarity determining region 1 (VLCDR1), a light chain complementarity determining region 2 (VLCDR2), and a light chain complementarity determining region 3 (VLCDR3),
wherein:
(1) the VHCDR1, VHCDR2, and VHCDR3 of the first antigen binding domain comprise the sequences of:
SEQ ID NO: 7396, SEQ ID NO: 7400, and SEQ ID NO: 7403, respectively; or
SEQ ID NO: 7444, SEQ ID NO: 7400, and SEQ ID NO: 7403, respectively; and
the VLCDR1, VLCDR2, and VLCDR3 of the first antigen binding domain comprise the sequences of:
SEQ ID NO: 7387, SEQ ID NO: 7389, and SEQ ID NO: 7410, respectively;
SEQ ID NO: 7387, SEQ ID NO: 7389, and SEQ ID NO: 7415, respectively;
SEQ ID NO: 7387, SEQ ID NO: 7389, and SEQ ID NO: 7417, respectively; or
SEQ ID NO: 7387, SEQ ID NO: 7389, and SEQ ID NO: 7392, respectively; and/or
(2) the second antigen binding domain binds to NKp30, and the VHCDR1, VHCDR2, and VHCDR3 of the second antigen binding domain comprise the sequences of:
SEQ ID NO: 7498, SEQ ID NO: 6001, SEQ ID NO: 7315, respectively; or
SEQ ID NO: 7498, SEQ ID NO: 7437, SEQ ID NO: 7315, respectively; and
the VLCDR1, VLCDR2, and VLCDR3 of the second antigen binding domain comprise the sequences of:
SEQ ID NO: 7326, SEQ ID NO: 7327, SEQ ID NO: 7416, respectively;
SEQ ID NO: 7494, SEQ ID NO: 7496, SEQ ID NO: 44, respectively;
SEQ ID NO: 7326, SEQ ID NO: 7327, SEQ ID NO: 44, respectively; or
SEQ ID NO: 7326, SEQ ID NO: 7327, SEQ ID NO: 7447, respectively.

137. The composition of claim 136, wherein:
(a) the VHCDR1, VHCDR2, and VHCDR3 of the first antigen binding domain comprise the sequences of:
SEQ ID NO: 6253, SEQ ID NO: 6254, and SEQ ID NO: 6255, respectively;
SEQ ID NO: 6256, SEQ ID NO: 6257, and SEQ ID NO: 6258, respectively;
SEQ ID NO: 6256, SEQ ID NO: 6257, and SEQ ID NO: 6262, respectively;
SEQ ID NO: 6358, SEQ ID NO: 6360, and SEQ ID NO: 227, respectively;
SEQ ID NO: 7396, SEQ ID NO: 7400, and SEQ ID NO: 7403, respectively;
SEQ ID NO: 7444, SEQ ID NO: 7400, and SEQ ID NO: 7403, respectively; or
SEQ ID NO: 6253, SEQ ID NO: 243, and SEQ ID NO: 6255, respectively; and
(b) the VLCDR1, VLCDR2, and VLCDR3 of the first antigen binding domain comprise the sequences of:
SEQ ID NO: 6259, SEQ ID NO: 6260, and SEQ ID NO: 6261, respectively;
SEQ ID NO: 251, SEQ ID NO: 246, and SEQ ID NO: 248, respectively;
SEQ ID NO: 251, SEQ ID NO: 253, and SEQ ID NO: 255, respectively;
SEQ ID NO: 258, SEQ ID NO: 260, and SEQ ID NO: 262, respectively;
SEQ ID NO: 265, SEQ ID NO: 267, and SEQ ID NO: 269, respectively;
SEQ ID NO: 272, SEQ ID NO: 274, and SEQ ID NO: 276, respectively;
SEQ ID NO: 279, SEQ ID NO: 281, and SEQ ID NO: 283, respectively;
SEQ ID NO: 7387, SEQ ID NO: 7389, and SEQ ID NO: 7410, respectively;
SEQ ID NO: 7387, SEQ ID NO: 7389, and SEQ ID NO: 7415, respectively;
SEQ ID NO: 7387, SEQ ID NO: 7389, and SEQ ID NO: 7417, respectively;
SEQ ID NO: 7387, SEQ ID NO: 7389, and SEQ ID NO: 7392, respectively; or
SEQ ID NO: 6259, SEQ ID NO: 6260, and SEQ ID NO: 6261, respectively.

138. The composition of claim 136, wherein the VHCDR1, VHCDR2, VHCDR3, VLCDR1, VLCDR2, and VLCDR3 of the first antigen binding domain comprise the sequences of:
SEQ ID NOs: 6253, 6254, 6255, 6259, 6260, and 6261, respectively;
SEQ ID NO: 6256, 6257, 6258, 6259, 6260, and 6261 respectively;
SEQ ID NOs: 6253, 6254, 6255, 6259, 6260, and 6261 respectively;
SEQ ID NO: 6256, 6257, 6262, 6259, 6260, and 6261 respectively;
SEQ ID NO: 6358, 6360, 227, 251, 246, and 248 respectively;
SEQ ID NO: 6358, 6360, 227, 251, 253, and 255 respectively;
SEQ ID NO: 6358, 6360, 227, 258, 260, and 262 respectively;
SEQ ID NO: 6358, 6360, 227, 258, 260, and 248 respectively;
SEQ ID NO: 6358, 6360, 227, 265, 267, 269 and respectively; or
SEQ ID NO: 7396, 7400, 7403, 7387, 7389, and 7392, respectively.

139. The composition of claim 136, wherein:
(a) (i) the VH of the first antigen binding domain comprises a sequence having at least 75% identity to the sequence of: SEQ ID NO: 6247, SEQ ID NO: 6248, SEQ ID NO: 6250, SEQ ID NO: 6251, SEQ ID NO: 6347, SEQ ID NO: 7418, SEQ ID NO: 7425, SEQ ID NO: 7438, SEQ ID NO: 7446, SEQ ID NO: 6349, SEQ ID NO: 6350, SEQ ID NO: 6351, SEQ ID NO:6372, SEQ ID NO: 234, SEQ ID NO: 235, SEQ ID NO: 236, or SEQ ID NO: 237; and
(ii) the VL of the first antigen binding domain comprises a sequence having at least 75% identity to the sequence of: SEQ ID NO: 6249, SEQ ID NO: 6252, SEQ ID NO: 6348, SEQ ID NO: 6352, SEQ ID NO:6353, SEQ ID NO: 6354, SEQ ID NO: 6355, SEQ ID NO: 6356, SEQ ID NO: 7419, SEQ ID NO: 7420, SEQ ID NO: 7421, SEQ ID NO: 7422, SEQ ID NO: 7428, SEQ ID NO: 7432, SEQ ID NO: 7435, SEQ ID NO: 7440, SEQ ID NO: 7441, SEQ ID NO: 7442, 238, SEQ ID NO: 239, SEQ ID NO:240, SEQ ID NO: 241, or SEQ ID NO: 242;
(b) the VH and the VL of the first antigen binding domain comprise sequences having at least 75% identity to the sequences of:
SEQ ID NO: 6372 and SEQ ID NO: 238, respectively;
SEQ ID NO: 234 and SEQ ID NO: 238, respectively;
SEQ ID NO: 235 and SEQ ID NO: 238, respectively;
SEQ ID NO: 236 and SEQ ID NO: 238, respectively;
SEQ ID NO: 237 and SEQ ID NO: 238, respectively;
SEQ ID NO: 6372 and SEQ ID NO: 239, respectively;
SEQ ID NO: 234 and SEQ ID NO: 239, respectively;
SEQ ID NO: 235 and SEQ ID NO: 239, respectively;
SEQ ID NO: 236 and SEQ ID NO: 239, respectively;
SEQ ID NO: 237 and SEQ ID NO: 239, respectively;
SEQ ID NO: 6372 and SEQ ID NO: 240, respectively;
SEQ ID NO: 234 and SEQ ID NO: 240, respectively;
SEQ ID NO: 235 and SEQ ID NO: 240, respectively;
SEQ ID NO: 236 and SEQ ID NO: 240, respectively;
SEQ ID NO: 237 and SEQ ID NO: 240, respectively;
SEQ ID NO: 6372 and SEQ ID NO: 241, respectively;
SEQ ID NO: 234 and SEQ ID NO: 241, respectively;
SEQ ID NO: 235 and SEQ ID NO: 241, respectively;
SEQ ID NO: 236 and SEQ ID NO: 241, respectively;
SEQ ID NO: 237 and SEQ ID NO: 241, respectively;
SEQ ID NO: 6372 and SEQ ID NO: 242, respectively;
SEQ ID NO: 234 and SEQ ID NO: 242, respectively;
SEQ ID NO: 234 and SEQ ID NO: 242, respectively;
SEQ ID NO: 235 and SEQ ID NO: 242, respectively;
SEQ ID NO: 236 and SEQ ID NO: 242, respectively; or
SEQ ID NO: 237 and SEQ ID NO: 242, respectively; or
(c) the first antigen binding domain comprises a sequence having at least 75% identity to the sequence of: SEQ ID NO: 7499, SEQ ID NO: 7500, SEQ ID NO: 7501, SEQ ID NO: 7502, SEQ ID NO: 7503, SEQ ID NO: 7504, SEQ ID NO: 7505, or SEQ ID NO: 7506.

140. The composition of claim 136, wherein:
(a) (i) the VH of the first antigen binding domain comprises the sequence of: SEQ ID NO: 6247, SEQ ID NO: 6248, SEQ ID NO: 6250, SEQ ID NO: 6251, SEQ ID NO: 6347, SEQ ID NO: 7418, SEQ ID NO: 7425, SEQ ID NO: 7438, SEQ ID NO: 7446, SEQ ID NO: 6349, SEQ ID NO: 6350, SEQ ID NO: 6351, SEQ ID NO:6372, SEQ ID NO: 234, SEQ ID NO: 235, SEQ ID NO: 236, or SEQ ID NO: 237; and
(ii) the VL of the first antigen binding domain comprises the sequence of: SEQ ID NO: 6249, SEQ ID NO: 6252, SEQ ID NO: 6348, SEQ ID NO: 6352, SEQ ID NO:6353, SEQ ID NO: 6354, SEQ ID NO: 6355, SEQ ID NO: 6356, SEQ ID NO: 7419, SEQ ID NO: 7420, SEQ ID NO: 7421, SEQ ID NO: 7422, SEQ ID NO: 7428, SEQ ID NO: 7432, SEQ ID NO: 7435, SEQ ID NO: 7440, SEQ ID NO: 7441, SEQ ID NO: 7442, 238, SEQ ID NO: 239, SEQ ID NO:240, SEQ ID NO: 241, or SEQ ID NO: 242;
(b) the VH and the VL of the first antigen binding domain comprise the sequences of:
SEQ ID NO: 6372 and SEQ ID NO: 238, respectively;
SEQ ID NO: 234 and SEQ ID NO: 238, respectively;
SEQ ID NO: 235 and SEQ ID NO: 238, respectively;
SEQ ID NO: 236 and SEQ ID NO: 238, respectively;
SEQ ID NO: 237 and SEQ ID NO: 238, respectively;
SEQ ID NO: 6372 and SEQ ID NO: 239, respectively;
SEQ ID NO: 234 and SEQ ID NO: 239, respectively;
SEQ ID NO: 235 and SEQ ID NO: 239, respectively;
SEQ ID NO: 236 and SEQ ID NO: 239, respectively;
SEQ ID NO: 237 and SEQ ID NO: 239, respectively;
SEQ ID NO: 6372 and SEQ ID NO: 240, respectively;
SEQ ID NO: 234 and SEQ ID NO: 240, respectively;
SEQ ID NO: 235 and SEQ ID NO: 240, respectively;
SEQ ID NO: 236 and SEQ ID NO: 240, respectively;
SEQ ID NO: 237 and SEQ ID NO: 240, respectively;
SEQ ID NO: 6372 and SEQ ID NO: 241, respectively;
SEQ ID NO: 234 and SEQ ID NO: 241, respectively;
SEQ ID NO: 235 and SEQ ID NO: 241, respectively;
SEQ ID NO: 236 and SEQ ID NO: 241, respectively;
SEQ ID NO: 237 and SEQ ID NO: 241, respectively;
SEQ ID NO: 6372 and SEQ ID NO: 242, respectively;
SEQ ID NO: 234 and SEQ ID NO: 242, respectively;
SEQ ID NO: 234 and SEQ ID NO: 242, respectively;
SEQ ID NO: 235 and SEQ ID NO: 242, respectively;
SEQ ID NO: 236 and SEQ ID NO: 242, respectively; or
SEQ ID NO: 237 and SEQ ID NO: 242, respectively; or
(c) the first antigen binding domain comprises the sequence of: SEQ ID NO: 7499, SEQ ID NO: 7500, SEQ ID NO: 7501, SEQ ID NO: 7502, SEQ ID NO: 7503, SEQ ID NO: 7504, SEQ ID NO: 7505, or SEQ ID NO: 7506.

141. The composition of claim 136, wherein the second antigen binding domain binds to TCRβV and comprises:
(a) the VHCDR1, VHCDR2, and VHCDR3 of the second antigen binding domain comprising the sequences of:
SEQ ID NO: 3, SEQ ID NO: 4, and SEQ ID NO: 5, respectively;
SEQ ID NO: 45, SEQ ID NO: 46, and SEQ ID NO: 47, respectively;
SEQ ID NO: 48, SEQ ID NO: 49, and SEQ ID NO: 50, respectively;
SEQ ID NO: 17, SEQ ID NO: 18, and SEQ ID NO: 19, respectively;
SEQ ID NO: 57, SEQ ID NO: 58, and SEQ ID NO: 59, respectively;
SEQ ID NO: 60, SEQ ID NO: 61, and SEQ ID NO: 62, respectively;
SEQ ID NO: 1315, SEQ ID NO: 1316, SEQ ID NO: 1317, respectively;
SEQ ID NO: 1318, SEQ ID NO: 1319, SEQ ID NO: 1317, respectively;
SEQ ID NO: 1320, SEQ ID NO: 1316, SEQ ID NO: 1317, respectively;
SEQ ID NO: 1298, SEQ ID NO: 1299, and SEQ ID NO: 1300, respectively;
SEQ ID NO: 1302, SEQ ID NO: 1303, and SEQ ID NO: 1301, respectively;
SEQ ID NO: 1304, SEQ ID NO: 1299, and SEQ ID NO: 1301, respectively;
SEQ ID NO: 1288, SEQ ID NO: 1289, and SEQ ID NO: 1290, respectively;
SEQ ID NO: 1291, SEQ ID NO: 1292, and SEQ ID NO: 1290, respectively;
SEQ ID NO: 1293, SEQ ID NO: 1289, and SEQ ID NO: 1290, respectively;
SEQ ID NO: 1102, SEQ ID NO: 1103, and SEQ ID NO: 1104, respectively;
SEQ ID NO: 1105, SEQ ID NO: 1106, and SEQ ID NO: 1104, respectively;
SEQ ID NO: 1107, SEQ ID NO: 1103, and SEQ ID NO: 1104, respectively;
SEQ ID NO: 1120, SEQ ID NO: 1121, and SEQ ID NO: 1122, respectively;
SEQ ID NO: 1123, SEQ ID NO: 1124, and SEQ ID NO: 1122, respectively;
SEQ ID NO: 1123, SEQ ID NO: 1124, and SEQ ID NO: 1122, respectively;
SEQ ID NO: 1125, SEQ ID NO: 1121, and SEQ ID NO: 1122, respectively;
SEQ ID NO: 1141, SEQ ID NO: 1142, and SEQ ID NO: 1143, respectively;
SEQ ID NO: 1144, SEQ ID NO: 1145, and SEQ ID NO: 1143, respectively;
SEQ ID NO: 1146, SEQ ID NO: 1142, and SEQ ID NO: 1143, respectively;
SEQ ID NO: 1163, SEQ ID NO: 1164, and SEQ ID NO: 1165, respectively;
SEQ ID NO: 1166, SEQ ID NO: 1167, and SEQ ID NO: 1165, respectively;
SEQ ID NO: 1166, SEQ ID NO: 1164, and SEQ ID NO: 1165, respectively;
SEQ ID NO: 1185, SEQ ID NO: 1186, and SEQ ID NO: 1187, respectively;
SEQ ID NO: 1188, SEQ ID NO: 1189, and SEQ ID NO: 1187, respectively;
SEQ ID NO: 1190, SEQ ID NO: 1186, and SEQ ID NO: 1187, respectively;
SEQ ID NO: 1208, SEQ ID NO: 1209, and SEQ ID NO: 1210, respectively;
SEQ ID NO: 1211, SEQ ID NO: 1212, and SEQ ID NO: 1210, respectively;
SEQ ID NO: 1213, SEQ ID NO: 1209, and SEQ ID NO: 1210, respectively;
SEQ ID NO: 1229, SEQ ID NO: 1230, and SEQ ID NO: 1231, respectively;
SEQ ID NO: 1232, SEQ ID NO: 1233, and SEQ ID NO: 1231, respectively;
SEQ ID NO: 1234, SEQ ID NO: 1230, and SEQ ID NO: 1231, respectively;
SEQ ID NO: 1248, SEQ ID NO: 1249, and SEQ ID NO: 1250, respectively;
SEQ ID NO: 1251, SEQ ID NO: 1252, and SEQ ID NO: 1250, respectively;
SEQ ID NO: 1253, SEQ ID NO: 1249, and SEQ ID NO: 1250, respectively;
SEQ ID NO: 1268, SEQ ID NO: 1269, and SEQ ID NO: 1270, respectively;
SEQ ID NO: 1271, SEQ ID NO: 1272, and SEQ ID NO: 1270, respectively; or
SEQ ID NO: 1273, SEQ ID NO: 1269, and SEQ ID NO: 1270, respectively; and
(b) the VLCDR1, VLCDR2, and VLCDR3 of the second antigen binding domain comprising the sequences of:
SEQ ID NO: 6, SEQ ID NO: 7, and SEQ ID NO: 8, respectively;
SEQ ID NO: 51, SEQ ID NO: 52, and SEQ ID NO: 53, respectively;
SEQ ID NO: 54, SEQ ID NO: 55, and SEQ ID NO: 56, respectively;
SEQ ID NO: 20, SEQ ID NO: 21, and SEQ ID NO: 22, respectively;
SEQ ID NO: 63, SEQ ID NO: 64, and SEQ ID NO: 65, respectively;
SEQ ID NO: 66, SEQ ID NO: 67, and SEQ ID NO: 68, respectively;
SEQ ID NO: 1305, SEQ ID NO: 1306, and SEQ ID NO: 1307, respectively;
SEQ ID NO: 1308, SEQ ID NO: 1306, and SEQ ID NO: 1307, respectively;
SEQ ID NO: 1294, SEQ ID NO: 1295, and SEQ ID NO: 1296, respectively;
SEQ ID NO: 1297, SEQ ID NO: 1295, and SEQ ID NO: 1296, respectively;
SEQ ID NO: 7489, SEQ ID NO: 1108, and SEQ ID NO: 1109, respectively;
SEQ ID NO: 1110, SEQ ID NO: 1108, and SEQ ID NO: 1109, respectively;
SEQ ID NO: 1126, SEQ ID NO: 1127, and SEQ ID NO: 1128, respectively;
SEQ ID NO: 1129, SEQ ID NO: 1127, and SEQ ID NO: 1128, respectively;
SEQ ID NO: 1147, SEQ ID NO: 1148, and SEQ ID NO: 1149, respectively;
SEQ ID NO: 1150, SEQ ID NO: 1148, and SEQ ID NO: 1149, respectively;
SEQ ID NO: 1168, SEQ ID NO: 1169, and SEQ ID NO: 1170, respectively;
SEQ ID NO: 1171, SEQ ID NO: 1169, and SEQ ID NO: 1170, respectively;
SEQ ID NO: 1191, SEQ ID NO: 1192, and SEQ ID NO: 1193, respectively;
SEQ ID NO: 1194, SEQ ID NO: 1192, and SEQ ID NO: 1193, respectively;
SEQ ID NO: 1214, SEQ ID NO: 1215, and SEQ ID NO: 1216, respectively;
SEQ ID NO: 1217, SEQ ID NO: 1215, and SEQ ID NO: 1216, respectively;
SEQ ID NO: 1235, SEQ ID NO: 1236, and SEQ ID NO: 1237, respectively;
SEQ ID NO: 1238, SEQ ID NO: 1236, and SEQ ID NO: 1237, respectively;
SEQ ID NO: 1254, SEQ ID NO: 1255, and SEQ ID NO: 1256, respectively;
SEQ ID NO: 1257, SEQ ID NO: 1255, and SEQ ID NO: 1256, respectively; or
SEQ ID NO: 1275, SEQ ID NO: 1276, and SEQ ID NO: 1277, respectively.

142. The composition of claim 136, wherein the second antigen binding domain binds to TCRβV, and wherein the VHCDR1, VHCDR2, a VHCDR3, VLCDR1, VLCDR2, and VLCDR3 of the second antigen binding domain comprise the sequences of:
SEQ ID NOs: 3, 4, 5, 6, 7, and 8, respectively;
SEQ ID NOs: 45, 46, 47, 51, 52, and 53, respectively;
SEQ ID NOs: 48, 49, 50, 54, 55, and 56, respectively;
SEQ ID NOs: 17, 18, 19, 20, 21, and 22, respectively;
SEQ ID NOs: 57, 58, 59, 63, 64, and 65, respectively;
SEQ ID NOs: 60, 61, 62, 66, 67, and 68, respectively;
SEQ ID NOs: 1315, 1316, 1317, 1321, 1322, and 1323, respectively;
SEQ ID NOs: 1318, 1319, 1317, 1321, 1322, and 1323, respectively;
SEQ ID NOs: 1320, 1316, 1317, 1321, 1322, and 1323, respectively;
SEQ ID NOs: 1298, 1299, 1300, 1305, 1306, and 1307, respectively;
SEQ ID NOs: 1302, 1303, 1301, 1308, 1306, and 1307, respectively;
SEQ ID NOs: 1304, 1299, 1301, 1305, 1306, and 1307, respectively;
SEQ ID NOs: 1288, 1289, 1290, 1294, 1295, and 1296, respectively;
SEQ ID NOs: 1291, 1292, 1290, 1297, 1295, and 1296, respectively;
SEQ ID NOs: 1293, 1289, 1290, 1294, 1295, and 1296, respectively;
SEQ ID NOs: 1102, 1103, 1104, 7489, 1108, and 1109, respectively;
SEQ ID NOs: 1105, 1106, 1104, 1110, 1108, and 1109, respectively;
SEQ ID NOs: 1107, 1103, 1104, 7489, 1108, and 1109, respectively;
SEQ ID NOs: 1120, 1121, 1122, 1126, 1127, and 1128, respectively;
SEQ ID NOs: 1123, 1124, 1122, 1129, 1127, and 1128, respectively;
SEQ ID NOs: 1125, 1121, 1122, 1126, 1127, and 1128, respectively;
SEQ ID NOs: 1141, 1142, 1143, 1147, 1148, and 1149, respectively;
SEQ ID NOs: 1144, 1145, 1143, 1150, 1148, and 1149, respectively;
SEQ ID NOs: 1146, 1142, 1143, 1147, 1148, and 1149, respectively;
SEQ ID NOs: 1163, 1164, 1165, 1168, 1169, and 1170, respectively;
SEQ ID NOs: 1166, 1167, 1165, 1171, 1169, and 1170, respectively;
SEQ ID NOs: 1166, 1164, 1165, 1168, 1169, and 1170, respectively;
SEQ ID NOs: 1185, 1186, 1187, 1191, 1192, and 1193, respectively;
SEQ ID NOs: 1188, 1189, 1187, 1194, 1192, and 1193, respectively;
SEQ ID NOs: 1190, 1186, 1187, 1191, 1192, and 1193, respectively;
SEQ ID NOs: 1208, 1209, 1210, 1214, 1215, and 1216, respectively;
SEQ ID NOs: 1211, 1212 1210, 1217, 1215, and 1216, respectively;
SEQ ID NOs: 1213, 1209, 1210, 1214, 1215, and 1216, respectively;
SEQ ID NOs: 1229, 1230, 1231, 1235, 1236, and 1237, respectively;
SEQ ID NOs: 1232, 1233, 1231, 1238, 1236, and 1237, respectively;
SEQ ID NOs: 1234, 1230, 1231, 1235, 1236, and 1237, respectively;
SEQ ID NOs: 1248, 1249, 1250, 1254, 1255, and 1256, respectively;
SEQ ID NOs: 1251, 1252, 1250, 1257, 1255, and 1256, respectively;
SEQ ID NOs: 1253, 1249, 1250, 1254, 1255, and 1256, respectively;
SEQ ID NOs: 1268, 1269, 1270, 1275, 1276, and 1277, respectively;
SEQ ID NOs: 1271, 1272, 1270, 1275, 1276, and 1277, respectively; or
SEQ ID NOs: 1273, 1269, 1270, 1275, 1276, and 1277, respectively.

143. The composition of claim 136, wherein the second antigen binding domain binds to TCRβV, and wherein:
(a) (i) the VH of the second antigen binding domain comprises a sequence having at least 75% identity to SEQ ID NO: 1, SEQ ID NO: 9, SEQ ID NO: 82, SEQ ID NO: 85, SEQ ID NO: 88, SEQ ID NO: 91, SEQ ID NO: 94, SEQ ID NO: 97, SEQ ID NO: 100, SEQ ID NO: 103, SEQ ID NO: 106, SEQ ID NO: 109, SEQ ID NO: 112, SEQ ID NO: 115, SEQ ID NO: 118, SEQ ID NO: 121, SEQ ID NO: 124, SEQ ID NO: 127, SEQ ID NO: 130, SEQ ID NO: 133, SEQ ID NO: 136, SEQ ID NO: 139, SEQ ID NO: 142, SEQ ID NO: 145, SEQ ID NO: 148, SEQ ID NO: 151, SEQ ID NO: 155, SEQ ID NO: 158, SEQ ID NO: 161, SEQ ID NO: 164, SEQ ID NO: 167, SEQ ID NO: 170, SEQ ID NO: 173, SEQ ID NO: 176, SEQ ID NO: 179, SEQ ID NO: 182, SEQ ID NO: 185, SEQ ID NO: 188, SEQ ID NO: 191, SEQ ID NO: 194, SEQ ID NO: 197, SEQ ID NO: 200, SEQ ID NO: 203, SEQ ID NO: 205, SEQ ID NO: 207, SEQ ID NO: 209, SEQ ID NO: 211, SEQ ID NO: 213, SEQ ID NO: 215, SEQ ID NO:217, SEQ ID NO: 219, SEQ ID NO: 221, SEQ ID NO: 223, SEQ ID NO: 225, SEQ ID NO: 1100, SEQ ID NO: 1310, SEQ ID NO:1311, SEQ ID NO: 1312, SEQ ID NO: 1346, SEQ ID NO:1348, SEQ ID NO: 1350, SEQ ID NO: 1356, SEQ ID NO: 1360, SEQ ID NO: 1362, SEQ ID NO: 1370, SEQ ID NO: 1344, SEQ ID NO: 15, SEQ ID NO: 23, SEQ ID NO: 24, SEQ ID NO: 25, SEQ ID NO: 232, SEQ ID NO: 1325, SEQ ID NOs: 3040-3183, SEQ ID NOs: 3225-3274, SEQ ID NOs: 1112-1116, SEQ ID NOs: 1130-1135, SEQ ID NOs: 1152-1157, SEQ ID NOs: 1172-1177, SEQ ID NOs: 1196-1202, SEQ ID NOs: 1219-1223, SEQ ID NOs: 1240-1243, SEQ ID NOs: 1259-1263, SEQ ID NOs: 1283-1287, or SEQ ID NO: 1274; and
(ii) the VL of the second antigen binding domain comprises a sequence having at least 75% identity to the sequence of:
SEQ ID NO: 2, SEQ ID NO: 10, SEQ ID NO: 11, SEQ ID NO: 81, SEQ ID NO: 84, SEQ ID NO: 87, SEQ ID NO: 90, SEQ ID NO: 93, SEQ ID NO: 96, SEQ ID NO: 99, SEQ ID NO: 102, SEQ ID NO: 105, SEQ ID NO: 108, SEQ ID NO: 111, SEQ ID NO: 114, SEQ ID NO: 117, SEQ ID NO: 120, SEQ ID NO: 123, SEQ ID NO: 126, SEQ ID NO: 129, SEQ ID NO: 132, SEQ ID NO: 135, SEQ ID NO: 138, SEQ ID NO: 141, SEQ ID NO: 144, SEQ ID NO: 147, SEQ ID NO: 150, SEQ ID NO: 154, SEQ ID NO: 157, SEQ ID NO: 160, SEQ ID NO: 163, SEQ ID NO: 166, SEQ ID NO: 169, SEQ ID NO: 172, SEQ ID NO: 175, SEQ ID NO: 178, SEQ ID NO: 181, SEQ ID NO: 184, SEQ ID NO: 187, SEQ ID NO: 190, SEQ ID NO: 193, SEQ ID NO: 196, SEQ ID NO: 199, SEQ ID NO: 202, SEQ ID NO: 1101, SEQ ID NO: 1313, SEQ ID NO: 1314, SEQ ID NO: 1347, SEQ ID NO: 1349, SEQ ID NO: 1351, SEQ ID NO: 1353, SEQ ID NO: 1357, SEQ ID NO: 1361, SEQ ID NO: 1365, SEQ ID NO: 1367, SEQ ID NO: 1369, SEQ ID NO: 16, SEQ ID NOs: 26-30, SEQ ID NOs: 3000-3039, SEQ ID NOs: 3092-3132, SEQ ID NOs: 3184-3224, SEQ ID NOs: 1117-1119, SEQ ID NOs: 1136-1140, SEQ ID NOs: 1158-1162, SEQ ID NOs: 1178-1184, SEQ ID NOs: 1203-1207, SEQ ID NOs: 1224-1227, SEQ ID NOs: 1244-1247, SEQ ID NOs: 1264-1267, SEQ ID NOs: 1278-1282, SEQ ID NO: 7488, SEQ ID NO: 1324, SEQ ID NO: 1111, SEQ ID NO: 1151, SEQ ID NO: 1195, SEQ ID NO: 1218, SEQ ID NO: 1239, SEQ ID NO: 1258, SEQ ID NO: 7490, or SEQ ID NO: 7491;
(b) the VH and the VL of the second antigen binding domain comprise sequences having at least 75% identity to the sequences of:
SEQ ID NO: 1 and SEQ ID NO: 2, respectively;
SEQ ID NO: 9 and SEQ ID NO: 10, respectively;
SEQ ID NO: 9 and SEQ ID NO: 11, respectively;
SEQ ID NO: 82 and SEQ ID NO: 81, respectively;
SEQ ID NO: 85 and SEQ ID NO: 84, respectively;
SEQ ID NO: 88 and SEQ ID NO: 87, respectively;
SEQ ID NO: 91 and SEQ ID NO: 90, respectively;
SEQ ID NO: 94 and SEQ ID NO: 93, respectively;
SEQ ID NO: 97 and SEQ ID NO: 96, respectively;
SEQ ID NO: 100 and SEQ ID NO: 99, respectively;
SEQ ID NO: 103 and SEQ ID NO: 102, respectively;
SEQ ID NO: 106 and SEQ ID NO: 105, respectively;
SEQ ID NO: 109 and SEQ ID NO: 108, respectively;
SEQ ID NO: 112 and SEQ ID NO: 111, respectively;
SEQ ID NO: 115 and SEQ ID NO: 114, respectively;
SEQ ID NO: 118 and SEQ ID NO: 117, respectively;
SEQ ID NO: 121 and SEQ ID NO: 120, respectively;
SEQ ID NO: 124 and SEQ ID NO: 123, respectively;
SEQ ID NO: 127 and SEQ ID NO: 126, respectively;
SEQ ID NO: 130 and SEQ ID NO: 129, respectively;
SEQ ID NO: 133 and SEQ ID NO: 132, respectively;
SEQ ID NO: 136 and SEQ ID NO: 135, respectively;
SEQ ID NO: 139 and SEQ ID NO: 138, respectively;
SEQ ID NO: 142 and SEQ ID NO: 141, respectively;
SEQ ID NO: 145 and SEQ ID NO: 144, respectively;
SEQ ID NO: 148 and SEQ ID NO: 147, respectively;
SEQ ID NO: 151 and SEQ ID NO: 150, respectively;
SEQ ID NO: 155 and SEQ ID NO: 154, respectively;
SEQ ID NO: 158 and SEQ ID NO: 157, respectively;
SEQ ID NO: 161 and SEQ ID NO: 160, respectively;
SEQ ID NO: 164 and SEQ ID NO: 163, respectively;
SEQ ID NO: 167 and SEQ ID NO: 166, respectively;
SEQ ID NO: 170 and SEQ ID NO: 169, respectively;
SEQ ID NO: 173 and SEQ ID NO: 172, respectively;
SEQ ID NO: 176 and SEQ ID NO: 175, respectively;
SEQ ID NO: 179 and SEQ ID NO: 178, respectively;
SEQ ID NO: 182 and SEQ ID NO: 181, respectively;
SEQ ID NO: 185 and SEQ ID NO: 184, respectively;
SEQ ID NO: 188 and SEQ ID NO: 187, respectively;
SEQ ID NO: 191 and SEQ ID NO: 190, respectively;
SEQ ID NO: 194 and SEQ ID NO: 193, respectively;
SEQ ID NO: 197 and SEQ ID NO: 196, respectively;
SEQ ID NO: 200 and SEQ ID NO: 199, respectively;
SEQ ID NO: 203 and SEQ ID NO: 202, respectively;
SEQ ID NO: 1100 and SEQ ID NO: 1101, respectively;
SEQ ID NO: 1346 and SEQ ID NO: 1347, respectively;
SEQ ID NO: 1348 and SEQ ID NO: 1349, respectively;
SEQ ID NO: 1350 and SEQ ID NO: 1351, respectively;
SEQ ID NO: 1350 and SEQ ID NO: 1353, respectively;
SEQ ID NO: 1346 and SEQ ID NO: 1349, respectively;
SEQ ID NO: 1356 and SEQ ID NO: 1357, respectively;
SEQ ID NO: 1350 and SEQ ID NO: 1349, respectively;
SEQ ID NO: 1360 and SEQ ID NO: 1361, respectively;
SEQ ID NO: 1362 and SEQ ID NO: 1361, respectively;
SEQ ID NO: 1350 and SEQ ID NO: 1365, respectively;
SEQ ID NO: 1350 and SEQ ID NO: 1367, respectively;
SEQ ID NO: 1350 and SEQ ID NO: 1369, respectively;
SEQ ID NO: 1370 and SEQ ID NO: 1365, respectively;
SEQ ID NO: 1370 and SEQ ID NO: 1367, respectively;
SEQ ID NO: 1370 and SEQ ID NO: 1369, respectively;
SEQ ID NO: 1344 and SEQ ID NO: 1361, respectively;
SEQ ID NO: 15 and SEQ ID NO: 16, respectively;
SEQ ID NO: 23 and SEQ ID NO: 26, respectively;
SEQ ID NO: 24 and SEQ ID NO: 27, respectively;
SEQ ID NO: 25 and SEQ ID NO: 28, respectively;
SEQ ID NO: 232 and SEQ ID NO: 7488, respectively;
SEQ ID NO: 1325 and SEQ ID NO: 1324, respectively;
SEQ ID NO: 3091 and SEQ ID NO: 3092, respectively;
SEQ ID NO: 3183 and SEQ ID NO: 3184, respectively;
SEQ ID NO: 1112 and SEQ ID NO: 1111, respectively;
SEQ ID NO: 1130 and SEQ ID NO: 7490, respectively;
SEQ ID NO: 1152 and SEQ ID NO: 1151, respectively;
SEQ ID NO: 1172 and SEQ ID NO: 7491, respectively;
SEQ ID NO: 1196 and SEQ ID NO: 1195, respectively;
SEQ ID NO: 1219 and SEQ ID NO: 1218, respectively;
SEQ ID NO: 1240 and SEQ ID NO: 1239, respectively;
SEQ ID NO: 1259 and SEQ ID NO: 1258, respectively; or
SEQ ID NO: 1274 and SEQ ID NO: 1278, respectively; or
(c) the second antigen binding domain comprises a sequence having at least 75% identity to the sequence of: SEQ ID NO: 80, SEQ ID NO: 83, SEQ ID NO: 86, SEQ ID NO: 89, SEQ ID NO: 92, SEQ ID NO: 95, SEQ ID NO: 98, SEQ ID NO: 101, SEQ ID NO: 104, SEQ ID NO: 107, SEQ ID NO: 110, SEQ ID NO: 113, SEQ ID NO: 116, SEQ ID NO: 119, SEQ ID NO: 122, SEQ ID NO: 125, SEQ ID NO: 128, SEQ ID NO: 131, SEQ ID NO: 134, SEQ ID NO: 137, SEQ ID NO: 140, SEQ ID NO: 143, SEQ ID NO: 146, SEQ ID NO: 149, SEQ ID NO: 153, SEQ ID NO: 156, SEQ ID NO: 159, SEQ ID NO: 162, SEQ ID NO: 165, SEQ ID NO: 168, SEQ ID NO: 171, SEQ ID NO: 174, SEQ ID NO: 177, SEQ ID NO: 180, SEQ ID NO: 183, SEQ ID NO: 186, SEQ ID NO: 189, SEQ ID NO: 192, SEQ ID NO: 195, SEQ ID NO: 198, SEQ ID NO: 201, SEQ ID NO: 204, SEQ ID NO: 206, SEQ ID NO: 208, SEQ ID NO: 210, SEQ ID NO: 212, SEQ ID NO: 214, SEQ ID NO: 216, SEQ ID NO: 218, SEQ ID NO: 220, SEQ ID NO: 222, SEQ ID NO: 224, SEQ ID NO: 1309, SEQ ID NO: 3281, SEQ ID NO: 7492 SEQ ID NO: 1326-1342, or SEQ ID NO: 1376.

144. The composition of claim 136, wherein the second antigen binding domain binds to TCRβV, and wherein:
(a) (i) the VH of the second antigen binding domain comprises the sequence of: SEQ ID NO: 1, SEQ ID NO: 9, SEQ ID NO: 82, SEQ ID NO: 85, SEQ ID NO: 88, SEQ ID NO: 91, SEQ ID NO: 94, SEQ ID NO: 97, SEQ ID NO: 100, SEQ ID NO: 103, SEQ ID NO: 106, SEQ ID NO: 109, SEQ ID NO: 112, SEQ ID NO: 115, SEQ ID NO: 118, SEQ ID NO: 121, SEQ ID NO: 124, SEQ ID NO: 127, SEQ ID NO: 130, SEQ ID NO: 133, SEQ ID NO: 136, SEQ ID NO: 139, SEQ ID NO: 142, SEQ ID NO: 145, SEQ ID NO: 148, SEQ ID NO: 151, SEQ ID NO: 155, SEQ ID NO: 158, SEQ ID NO: 161, SEQ ID NO: 164, SEQ ID NO: 167, SEQ ID NO: 170, SEQ ID NO: 173, SEQ ID NO: 176, SEQ ID NO: 179, SEQ ID NO: 182, SEQ ID NO: 185, SEQ ID NO: 188, SEQ ID NO: 191, SEQ ID NO: 194, SEQ ID NO: 197, SEQ ID NO: 200, SEQ ID NO: 203, SEQ ID NO: 205, SEQ ID NO: 207, SEQ ID NO: 209, SEQ ID NO: 211, SEQ ID NO: 213, SEQ ID NO: 215, SEQ ID NO:217, SEQ ID NO: 219, SEQ ID NO: 221, SEQ ID NO: 223, SEQ ID NO: 225, SEQ ID NO: 1100, SEQ ID NO: 1310, SEQ ID NO:1311, SEQ ID NO: 1312, SEQ ID NO: 1346, SEQ ID NO:1348, SEQ ID NO: 1350, SEQ ID NO: 1356, SEQ ID NO: 1360, SEQ ID NO: 1362, SEQ ID NO: 1370, SEQ ID NO: 1344, SEQ ID NO: 15, SEQ ID NO: 23, SEQ ID NO: 24, SEQ ID NO: 25, SEQ ID NO: 232, SEQ ID NO: 1325, SEQ ID NOs: 3040-3183, SEQ ID NOs: 3225-3274, SEQ ID NOs: 1112-1116, SEQ ID NOs: 1130-1135, SEQ ID NOs: 1152-1157, 1172-1177, SEQ ID NOs: 1196-1202, SEQ ID NOs: 1219-1223, SEQ ID NOs: 1240-1243, SEQ ID NOs: 1259-1263, SEQ ID NOs: 1284-1287, or SEQ ID NO: 1274; and
(ii) the VL of the second antigen binding domain comprises the sequence of: SEQ ID NO: 2, SEQ ID NO: 10, SEQ ID NO: 11, SEQ ID NO: 81, SEQ ID NO: 84, SEQ ID NO: 87, SEQ ID NO: 90, SEQ ID NO: 93, SEQ ID NO: 96, SEQ ID NO: 99, SEQ ID NO: 102, SEQ ID NO: 105, SEQ ID NO: 108, SEQ ID NO: 111, SEQ ID NO: 114, SEQ ID NO: 117, SEQ ID NO: 120, SEQ ID NO: 123, SEQ ID NO: 126, SEQ ID NO: 129, SEQ ID NO: 132, SEQ ID NO: 135, SEQ ID NO: 138, SEQ ID NO: 141, SEQ ID NO: 144, SEQ ID NO: 147, SEQ ID NO: 150, SEQ ID NO: 154, SEQ ID NO: 157, SEQ ID NO: 160, SEQ ID NO: 163, SEQ ID NO: 166, SEQ ID NO: 169, SEQ ID NO: 172, SEQ ID NO: 175, SEQ ID NO: 178, SEQ ID NO: 181, SEQ ID NO: 184, SEQ ID NO: 187, SEQ ID NO: 190, SEQ ID NO: 193, SEQ ID NO: 196, SEQ ID NO: 199, SEQ ID NO: 202, SEQ ID NO: 1101, SEQ ID NO: 1313, SEQ ID NO: 1314, SEQ ID NO: 1347, SEQ ID NO: 1349, SEQ ID NO: 1351, SEQ ID NO: 1353, SEQ ID NO: 1357, SEQ ID NO: 1361, SEQ ID NO: 1365, SEQ ID NO: 1367, SEQ ID NO: 1369, SEQ ID NO: 16, SEQ ID NOs: 26-30, SEQ ID NOs: 3000-3039, SEQ ID NOs: 3092-3132, SEQ ID NOs: 3184-3224, SEQ ID NOs: 1117-1119, SEQ ID NOs: 1136-1140, SEQ ID NOs: 1158-1162, SEQ ID NOs: 1178-1184, SEQ ID NOs: 1203-1207, SEQ ID NOs: 1224-1227, SEQ ID NOs: 1244-1247, SEQ ID NOs: 1264-1267, SEQ ID NOs: 1278-1282, SEQ ID NOs: SEQ ID NO: 7488, SEQ ID NO: 1324, SEQ ID NO: 1111, SEQ ID NO: 1151, SEQ ID NO: 1195, SEQ ID NO: 1218, SEQ ID NO: 1239, SEQ ID NO: 1258, SEQ ID NO: 7490, or 7491;
(b) the VH and the VL of the second antigen binding domain comprise the sequences of:
SEQ ID NO: 1 and SEQ ID NO: 2, respectively;
SEQ ID NO: 9 and SEQ ID NO: 10, respectively;
SEQ ID NO: 9 and SEQ ID NO: 11, respectively;
SEQ ID NO: 82 and SEQ ID NO: 81, respectively;
SEQ ID NO: 85 and SEQ ID NO: 84, respectively;
SEQ ID NO: 88 and SEQ ID NO: 87, respectively;
SEQ ID NO: 91 and SEQ ID NO: 90, respectively;
SEQ ID NO: 94 and SEQ ID NO: 93, respectively;
SEQ ID NO: 97 and SEQ ID NO: 96, respectively;
SEQ ID NO: 100 and SEQ ID NO: 99, respectively;
SEQ ID NO: 103 and SEQ ID NO: 102, respectively;
SEQ ID NO: 106 and SEQ ID NO: 105, respectively;
SEQ ID NO: 109 and SEQ ID NO: 108, respectively;
SEQ ID NO: 112 and SEQ ID NO: 111, respectively;
SEQ ID NO: 115 and SEQ ID NO: 114, respectively;
SEQ ID NO: 118 and SEQ ID NO: 117, respectively;
SEQ ID NO: 121 and SEQ ID NO: 120, respectively;
SEQ ID NO: 124 and SEQ ID NO: 123, respectively;
SEQ ID NO: 127 and SEQ ID NO: 126, respectively;
SEQ ID NO: 130 and SEQ ID NO: 129, respectively;
SEQ ID NO: 133 and SEQ ID NO: 132, respectively;
SEQ ID NO: 136 and SEQ ID NO: 135, respectively;
SEQ ID NO: 139 and SEQ ID NO: 138, respectively;
SEQ ID NO: 142 and SEQ ID NO: 141, respectively;
SEQ ID NO: 145 and SEQ ID NO: 144, respectively;
SEQ ID NO: 148 and SEQ ID NO: 147, respectively;
SEQ ID NO: 151 and SEQ ID NO: 150, respectively;
SEQ ID NO: 155 and SEQ ID NO: 154, respectively;
SEQ ID NO: 158 and SEQ ID NO: 157, respectively;
SEQ ID NO: 161 and SEQ ID NO: 160, respectively;
SEQ ID NO: 164 and SEQ ID NO: 163, respectively;
SEQ ID NO: 167 and SEQ ID NO: 166, respectively;
SEQ ID NO: 170 and SEQ ID NO: 169, respectively;
SEQ ID NO: 173 and SEQ ID NO: 172, respectively;
SEQ ID NO: 176 and SEQ ID NO: 175, respectively;
SEQ ID NO: 179 and SEQ ID NO: 178, respectively;
SEQ ID NO: 182 and SEQ ID NO: 181, respectively;
SEQ ID NO: 185 and SEQ ID NO: 184, respectively;
SEQ ID NO: 188 and SEQ ID NO: 187, respectively;
SEQ ID NO: 191 and SEQ ID NO: 190, respectively;
SEQ ID NO: 194 and SEQ ID NO: 193, respectively;
SEQ ID NO: 197 and SEQ ID NO: 196, respectively;
SEQ ID NO: 200 and SEQ ID NO: 199, respectively;
SEQ ID NO: 203 and SEQ ID NO: 202, respectively;
SEQ ID NO: 1100 and SEQ ID NO: 1101, respectively;
SEQ ID NO: 1346 and SEQ ID NO: 1347, respectively;
SEQ ID NO: 1348 and SEQ ID NO: 1349, respectively;
SEQ ID NO: 1350 and SEQ ID NO: 1351, respectively;
SEQ ID NO: 1350 and SEQ ID NO: 1353, respectively;
SEQ ID NO: 1346 and SEQ ID NO: 1349, respectively;
SEQ ID NO: 1356 and SEQ ID NO: 1357, respectively;
SEQ ID NO: 1350 and SEQ ID NO: 1349, respectively;
SEQ ID NO: 1360 and SEQ ID NO: 1361, respectively;
SEQ ID NO: 1362 and SEQ ID NO: 1361, respectively;
SEQ ID NO: 1350 and SEQ ID NO: 1365, respectively;
SEQ ID NO: 1350 and SEQ ID NO: 1367, respectively;
SEQ ID NO: 1350 and SEQ ID NO: 1369, respectively;
SEQ ID NO: 1370 and SEQ ID NO: 1365, respectively;
SEQ ID NO: 1370 and SEQ ID NO: 1367, respectively;
SEQ ID NO: 1370 and SEQ ID NO: 1369, respectively;
SEQ ID NO: 1344 and SEQ ID NO: 1361, respectively;
SEQ ID NO: 15 and SEQ ID NO: 16, respectively;
SEQ ID NO: 23 and SEQ ID NO: 26, respectively;
SEQ ID NO: 24 and SEQ ID NO: 27, respectively;
SEQ ID NO: 25 and SEQ ID NO: 28, respectively;
SEQ ID NO: 232 and SEQ ID NO: 7488, respectively;
SEQ ID NO: 1325 and SEQ ID NO: 1324, respectively;
SEQ ID NO: 3091 and SEQ ID NO: 3092, respectively;
SEQ ID NO: 3183 and SEQ ID NO: 3184, respectively;
SEQ ID NO: 1112 and SEQ ID NO: 1111, respectively;
SEQ ID NO: 1130 and SEQ ID NO: 7490, respectively;
SEQ ID NO: 1152 and SEQ ID NO: 1151, respectively;
SEQ ID NO: 1172 and SEQ ID NO: 7491, respectively;
SEQ ID NO: 1196 and SEQ ID NO: 1195, respectively;
SEQ ID NO: 1219 and SEQ ID NO: 1218, respectively;
SEQ ID NO: 1240 and SEQ ID NO: 1239, respectively;
SEQ ID NO: 1259 and SEQ ID NO: 1258, respectively; or
SEQ ID NO: 1274 and SEQ ID NO: 1278, respectively; or
(c) the second antigen binding domain comprises the sequence of: SEQ ID NO: 80, SEQ ID NO: 83, SEQ ID NO: 86, SEQ ID NO: 89, SEQ ID NO: 92, SEQ ID NO: 95, SEQ ID NO: 98, SEQ ID NO: 101, SEQ ID NO: 104, SEQ ID NO: 107, SEQ ID NO: 110, SEQ ID NO: 113, SEQ ID NO: 116, SEQ ID NO: 119, SEQ ID NO: 122, SEQ ID NO: 125, SEQ ID NO: 128, SEQ ID NO: 131, SEQ ID NO: 134, SEQ ID NO: 137, SEQ ID NO: 140, SEQ ID NO: 143, SEQ ID NO: 146, SEQ ID NO: 149, SEQ ID NO: 153, SEQ ID NO: 156, SEQ ID NO: 159, SEQ ID NO: 162, SEQ ID NO: 165, SEQ ID NO: 168, SEQ ID NO: 171, SEQ ID NO: 174, SEQ ID NO: 177, SEQ ID NO: 180, SEQ ID NO: 183, SEQ ID NO: 186, SEQ ID NO: 189, SEQ ID NO: 192, SEQ ID NO: 195, SEQ ID NO: 198, SEQ ID NO: 201, SEQ ID NO: 204, SEQ ID NO: 206, SEQ ID NO: 208, SEQ ID NO: 210, SEQ ID NO: 212, SEQ ID NO: 214, SEQ ID NO: 216, SEQ ID NO: 218, SEQ ID NO: 220, SEQ ID NO: 222, SEQ ID NO: 224, SEQ ID NO: 1309, SEQ ID NO: 3281, SEQ ID NO: 7492 SEQ ID NO: 1326-1342, or SEQ ID NO: 1376.

145. The composition of claim 136, wherein the second antigen binding domain binds to NKp30 and comprises:
(a) the VHCDR1, VHCDR2, and VHCDR3 of the second antigen binding domain comprising the sequences of:
SEQ ID NO: 6000, SEQ ID NO: 6001, SEQ ID NO: 6002, respectively;
SEQ ID NO: 6007, SEQ ID NO: 6008, SEQ ID NO: 6009, respectively;
SEQ ID NO: 7313, SEQ ID NO: 6001, SEQ ID NO: 6002, respectively;
SEQ ID NO: 7313, SEQ ID NO: 6008, SEQ ID NO: 6009, respectively;
SEQ ID NO: 6007, SEQ ID NO: 6001, SEQ ID NO: 7315, respectively;
SEQ ID NO: 7498, SEQ ID NO: 6001, SEQ ID NO: 7315, respectively; or
SEQ ID NO: 7498, SEQ ID NO: 7437, SEQ ID NO: 7315, respectively; and
(b) the VLCDR1, VLCDR2, and VLCDR3 of the second antigen binding domain comprising the sequences of:
SEQ ID NO: 6063, SEQ ID NO: 6064, SEQ ID NO: 7293, respectively;
SEQ ID NO: 6070, SEQ ID NO: 6071, SEQ ID NO: 6072, respectively;
SEQ ID NO: 6070, SEQ ID NO: 6064, SEQ ID NO: 7321, respectively;
SEQ ID NO: 7326, SEQ ID NO: 7327, SEQ ID NO: 7329, respectively;
SEQ ID NO: 7326, SEQ ID NO: 7327, SEQ ID NO: 7416, respectively;
SEQ ID NO: 7494, SEQ ID NO: 7496, SEQ ID NO: 44, respectively;
SEQ ID NO: 7326, SEQ ID NO: 7327, SEQ ID NO: 44, respectively; or
SEQ ID NO: 7326, SEQ ID NO: 7327, SEQ ID NO: 7447, respectively.

146. The composition of claim 136, wherein the second antigen binding domain binds to NKp30, and wherein the VHCDR1, a VHCDR2, and a VHCDR3 of the second antigen domain comprise the sequences of:
SEQ ID NOs: 6000, 6001, 6002, 6063, 6064, and 7293, respectively;
SEQ ID NO: 6007, 6008, 6009, 6070, 6071, and 6072, respectively;
SEQ ID NOs: 7313, 6001, 6002, 6063, 6064, and 7293, respectively;
SEQ ID NO: 7313, 6008, 6009, 6070, 6071, and 6072, respectively;
SEQ ID NO: 7613, 7385, 7315, 6070, 6064, and 7321, respectively;
SEQ ID NO: 7313, 7318, 6009, 6070, 6064, and 7321, respectively;
SEQ ID NO: 7313, 6008, 6009, 6070, 6064, and 7321, respectively;
SEQ ID NOs: 7313, 6001, 7315, 7326, 7327, and 7329, respectively;
SEQ ID NOs: 7498, 6001, 7315, 7326, 7327, and 7416, respectively;
SEQ ID NOs: 7498, 6001, 7315, 7494, 7496, and 44 respectively;
SEQ ID NOs: 7498, 7437, 7315, 7326, 7327, and 7329, respectively; or
SEQ ID NOs: 7498, 7437, 7315, 7326, 7327, and 7447 respectively.

147. The composition of claim 136, wherein the second antigen binding domain binds to NKp30, and wherein:
(a) (i) the VH of the second antigen binding domain comprises a sequence having at least 75% identity to the sequence of SEQ ID NOs: 6121-6134, SEQ ID NO: 7295, SEQ ID NO: 7297, SEQ ID NO: 6122, SEQ ID NO: 7298, SEQ ID NO: 7300-7304, or SEQ ID NO: 7390; and
(ii) the VL of the second antigen binding domain comprises a sequence having at least 75% identity to any one of sequence selected from the group consisting of: SEQ ID NO: 7294, SEQ ID NOs: 6136-6147, SEQ ID NOs: 7296, SEQ ID NO: 7299, SEQ ID NO: 7305-7309; SEQ ID NO: 7395, SEQ ID NO: 7397, SEQ ID NO: 7399, SEQ ID NO: 7401, SEQ ID NO: 7404, or SEQ ID NO: 7405;
(b) the VH and the VL of the second antigen binding domain comprise sequences having at least 75% identity to the sequences of:
SEQ ID NO: 6121 and SEQ ID NO: 7294, respectively;
SEQ ID NO: 6122 and SEQ ID NO: 6136, respectively;
SEQ ID NO: 6123 and SEQ ID NO: 6137, respectively;
SEQ ID NO: 6124 and SEQ ID NO: 6138, respectively;
SEQ ID NO: 6125 and SEQ ID NO: 6139, respectively;
SEQ ID NO: 6126 and SEQ ID NO: 6140, respectively;
SEQ ID NO: 6127 and SEQ ID NO: 6141, respectively;
SEQ ID NO: 6129 and SEQ ID NO: 6142, respectively;
SEQ ID NO: 6130 and SEQ ID NO: 6143, respectively;
SEQ ID NO: 6131 and SEQ ID NO: 6144, respectively;
SEQ ID NO: 6132 and SEQ ID NO: 6145, respectively;
SEQ ID NO: 6133 and SEQ ID NO: 6146, respectively;
SEQ ID NO: 6134 and SEQ ID NO: 6147, respectively;
SEQ ID NO: 7295 and SEQ ID NO: 7296 respectively;
SEQ ID NO: 7297 and SEQ ID NO: 7296, respectively;
SEQ ID NO: 6122 and SEQ ID NO: 6136, respectively;
SEQ ID NO: 7298 and SEQ ID NO: 7299, respectively;
SEQ ID NO: 7300 and SEQ ID NO: 7305, respectively;
SEQ ID NO: 7301 and SEQ ID NO: 7306, respectively;
SEQ ID NO: 7302 and SEQ ID NO: 7307, respectively;
SEQ ID NO: 7303 and SEQ ID NO: 7308, respectively;
SEQ ID NO: 7304 and SEQ ID NO: 7309, respectively;
SEQ ID NO: 7302 and SEQ ID NO: 7395, respectively;
SEQ ID NO: 7302 and SEQ ID NO: 7397, respectively;
SEQ ID NO: 7302 and SEQ ID NO: 7399, respectively;
SEQ ID NO: 7302 and SEQ ID NO: 7401, respectively;
SEQ ID NO: 7390 and SEQ ID NO: 7309, respectively;
SEQ ID NO: 7390 and SEQ ID NO: 7305, respectively;
SEQ ID NO: 7390 and SEQ ID NO: 7404, respectively; or
SEQ ID NO: 7390 and SEQ ID NO: 7405, respectively; or
(c) the second antigen binding domain comprises a sequence having at least 75% identity to the sequence of: SEQ ID NOs: 6187-6190, SEQ ID NO: 7310, SEQ ID NO: 7311, SEQ ID NO: 7406, SEQ ID NO: 7407, SEQ ID NO: 7408, SEQ ID NO: 7409, SEQ ID NO: 7411, SEQ ID NO: 7412, SEQ ID NO: 7413, or SEQ ID NO: 7414.

148. The composition of claim 136, wherein the second antigen binding domain binds to NKp30, and wherein:
(a) (i) the VH of the second antigen binding domain comprises the sequence of SEQ ID NOs: 6121-6134, SEQ ID NO: 7295, SEQ ID NO: 7297, SEQ ID NO: 6122, SEQ ID NO: 7298, SEQ ID NO: 7300-7304, or SEQ ID NO: 7390; and
(ii) the VL of the second antigen binding domain comprises the sequence of: SEQ ID NO: 7294, SEQ ID NOs: 6136-6147, SEQ ID NOs: 7296, SEQ ID NO: 7299, SEQ ID NO: 7305-7309; SEQ ID NO: 7395, SEQ ID NO: 7397, SEQ ID NO: 7399, SEQ ID NO: 7401, SEQ ID NO: 7404, or SEQ ID NO: 7405; or
(b) the VH and the VL of the second antigen binding domain comprise the sequences of:
SEQ ID NO: 6121 and SEQ ID NO: 7294, respectively;
SEQ ID NO: 6122 and SEQ ID NO: 6136, respectively;
SEQ ID NO: 6123 and SEQ ID NO: 6137, respectively;
SEQ ID NO: 6124 and SEQ ID NO: 6138, respectively;
SEQ ID NO: 6125 and SEQ ID NO: 6139, respectively;
SEQ ID NO: 6126 and SEQ ID NO: 6140, respectively;
SEQ ID NO: 6127 and SEQ ID NO: 6141, respectively;
SEQ ID NO: 6129 and SEQ ID NO: 6142, respectively;
SEQ ID NO: 6130 and SEQ ID NO: 6143, respectively;
SEQ ID NO: 6131 and SEQ ID NO: 6144, respectively;
SEQ ID NO: 6132 and SEQ ID NO: 6145, respectively;
SEQ ID NO: 6133 and SEQ ID NO: 6146, respectively;
SEQ ID NO: 6134 and SEQ ID NO: 6147, respectively;
SEQ ID NO: 7295 and SEQ ID NO: 7296 respectively;
SEQ ID NO: 7297 and SEQ ID NO: 7296, respectively;
SEQ ID NO: 6122 and SEQ ID NO: 6136, respectively;
SEQ ID NO: 7298 and SEQ ID NO: 7299, respectively;
SEQ ID NO: 7300 and SEQ ID NO: 7305, respectively;
SEQ ID NO: 7301 and SEQ ID NO: 7306, respectively;
SEQ ID NO: 7302 and SEQ ID NO: 7307, respectively;
SEQ ID NO: 7303 and SEQ ID NO: 7308, respectively;
SEQ ID NO: 7304 and SEQ ID NO: 7309, respectively;
SEQ ID NO: 7302 and SEQ ID NO: 7395, respectively;
SEQ ID NO: 7302 and SEQ ID NO: 7397, respectively;
SEQ ID NO: 7302 and SEQ ID NO: 7399, respectively;
SEQ ID NO: 7302 and SEQ ID NO: 7401, respectively;
SEQ ID NO: 7390 and SEQ ID NO: 7309, respectively;
SEQ ID NO: 7390 and SEQ ID NO: 7305, respectively;
SEQ ID NO: 7390 and SEQ ID NO: 7404, respectively; or
SEQ ID NO: 7390 and SEQ ID NO: 7405, respectively; or
(c) the second antigen binding domain comprises the sequence of: SEQ ID NOs: 6187-6190, SEQ ID NO: 7310, SEQ ID NO: 7311, SEQ ID NO: 7406, SEQ ID NO: 7407, SEQ ID NO: 7408, SEQ ID NO: 7409, SEQ ID NO: 7411, SEQ ID NO: 7412, SEQ ID NO: 7413, or SEQ ID NO: 7414.

149. The composition of claim 136, wherein the multifunctional molecule further comprises a tumor-targeting moiety.

150. The composition of claim 149, wherein the tumor-targeting moiety binds to a tumor antigen.

151. The composition of claim 150, wherein the tumor antigen is selected from the group consisting of: G6B, CD34, CD41, P-selectin, Clec2, cKIT, FLT3, MPL, ITGB3, ITGB2, GP5, GP6, GP9, GP1BA, DSC2, FCGR2A, TNFRSF10A, TNFRSF10B, and TM4SF1.

152. The composition of claim 136, wherein the multifunctional molecule further comprises one, two, or all of a cytokine molecule, a cytokine inhibitor molecule, a death receptor signal engager, and a stromal modifying moiety.

153. The composition of claim 152, wherein:
(a) the cytokine molecule is selected from the group consisting of interleukin-2 (IL-2) or functional variant thereof, interleukin-7 (IL-7) or functional variant thereof, interleukin-12 (IL-12) or functional variant thereof, interleukin-15 (IL-15) or functional variant thereof, interleukin-18 (IL-18) or functional variant thereof, interleukin-21 (IL-21) or functional variant thereof, interferon gamma or functional variant thereof, and any combination thereof;
(b) the cytokine inhibitor molecule is a TGF-beta inhibitor;
(c) the death receptor signal engager is selected from the group consisting of a TNF-related apoptosis-inducing ligand (TRAIL) molecule, a death receptor molecule, and an antigen binding domain that specifically binds to a death receptor; or
(d) any combination thereof.

154. The composition of claim 136, wherein the multifunctional molecule comprises a dimerization module wherein the dimerization molecule comprises a first immunoglobulin constant region (Fc region) and the second portion of the dimerization module comprises a second Fc region.

155. The composition of claim 154, wherein the first Fc region, the second Fc region, or both comprise an Fc interface with one or more of: a paired cavity-protuberance, an electrostatic interaction, or a strand-exchange, wherein the dimerization of the first Fc region and the second Fc region is enhanced as indicated by a greater ratio of heteromultimer:homomultimer forms relative to a dimerization of Fc regions with a non-engineered interface.

156. The composition of claim 154, wherein the first Fc region, the second Fc region, or both comprise one or more mutations that result in reduced or ablated affinity for at least one Fc receptor as compared to a corresponding wildtype Fc region.

157. The composition of claim 154, wherein the multifunctional molecule comprises a first polypeptide and a second polypeptide, wherein the first polypeptide and the second polypeptide are non-contiguous,
wherein the first polypeptide comprises each of the following operatively linked together:
(a) the first Fc region; and
(b) the first antigen binding domain; and
wherein the second polypeptide comprises each of the following operatively linked together:
(c) the second Fc region; and
(d) an additional first antigen binding domain.

158. The composition of claim 157, wherein the first antigen binding domain or the additional first antigen binding domain comprise:
(a) a single chain variable fragment (scFv) or a single domain antibody (sdAb); or
(b) a first portion of the first antigen binding domain, wherein the first portion of the first antigen binding domain comprises the VH, wherein when the first polypeptide comprises the first portion of the first antigen binding domain, the multifunctional molecule further comprises a third polypeptide comprising a second portion of the first antigen binding domain, wherein the second portion of the first antigen binding domain comprises the VL, wherein the third polypeptide is non-contiguous with the first polypeptide and the second polypeptide.

159. The composition of claim 157, wherein the multifunctional molecule further comprises a fourth polypeptide, wherein the fourth polypeptide is non-contiguous with the first polypeptide, the second polypeptide, or the third polypeptide when the multifunctional molecule comprises the third polypeptide.

160. The composition of claim 159, wherein the fourth polypeptide comprises:
(a) the second antigen binding domain, wherein the second antigen binding domain comprises a single chain variable fragment (scFv) or a single domain antibody (sdAb); or
(b) a first portion of the second antigen binding domain, wherein the first portion of the second antigen binding domain comprises a heavy chain variable domain (VH), wherein when the fourth polypeptide comprises the first portion of the first antigen binding domain, the multifunctional molecule further comprises a fifth polypeptide comprising a second portion of the first antigen binding domain, wherein the second portion of the second antigen binding domain comprises a light chain variable domain (VL), wherein the fifth polypeptide is non-contiguous with the first polypeptide, the second polypeptide, the third polypeptide when the multifunctional molecule comprises the third polypeptide, or the fourth polypeptide when the multifunctional molecule comprises the fourth polypeptide.

161. The composition of claim 160, wherein the fourth polypeptide is linked to the N-terminus of the first polypeptide, the C-terminus of the first polypeptide, the N-terminus of the second polypeptide, the C-terminus of the second polypeptide, the N-terminus of the third polypeptide when the multifunctional molecule comprises the third polypeptide, the C-terminus of the third polypeptide when the multifunctional molecule comprises the third polypeptide, or any combination thereof.

162. The composition of claim 136, wherein the multifunctional molecule preferentially binds to a myeloproliferative neoplasm cell over a non-tumor cell, wherein the binding between the multifunctional molecule and the myeloproliferative neoplasm cell is more than 10, 20, 30, 40, or 50-fold greater than the binding between the multifunctional molecule and a non-tumor cell.

163. The composition of claim 161, wherein the myeloproliferative neoplasm cell is chosen from a myelofibrosis cell, an essential thrombocythemia cell, a polycythemia vera cell, or a chronic myeloid cancer cell, wherein:
the myeloproliferative neoplasm cell does not comprise a JAK2 V617F mutation, or
the myeloproliferative neoplasm cell does not comprise a MPL mutation.

164. A polynucleotide comprising a sequence encoding the multifunctional molecule of claim 136.

165. A method of making the multifunctional molecule of claim 136 comprising: culturing a cell comprising a polynucleotide that comprises a sequence encoding the multifunctional molecule under conditions suitable for gene expression and/or homo- or heterodimerization.

166. A pharmaceutical composition comprising the multifunctional molecule of claim 136, and a pharmaceutically acceptable carrier, excipient, or stabilizer for use in therapy.

167. A method of treating cancer in a subject in need thereof comprising: administering an effective amount of the multifunctional molecule of claim 136 to the subject, thereby treating the cancer in the subject.

The application's sequence listing, which the Patent Office published only in electronic form, follows.

SEQUENCE LISTING (7506 sequences)

SEQ ID NO: 1 - protein, 119 aa, synthetic construct
QVQLQQSGPELVKPGTSVKISCKASGYSFTTYYIHWVKQRPGQGLEWIGWFFPGSGNIKYNEKFKGKATLTADTSSSTAYMQLSSLTSEESAVYFCAGSYYSYDVLDYWGHGTTLTVSS

SEQ ID NO: 2 - protein, 107 aa, synthetic construct
DILMTQSQKFMSTSLGDRVSVSCKASQNVGINVVWHQQKPGQSPKALIYSSSHRYSGVPDRFTGSGSGTDFTLTINNVQSEDLAEYFCQQFKSYPLTFGAGTKLELK

SEQ ID NO: 3 - protein, 10 aa, synthetic construct
GYSFTTYYIH

SEQ ID NO: 4 - protein, 17 aa, synthetic construct
WFFPGSGNIKYNEKFKG

SEQ ID NO: 5 - protein, 10 aa, synthetic construct
SYYSYDVLDY

SEQ ID NO: 6 - protein, 11 aa, synthetic construct
KASQNVGINVV

SEQ ID NO: 7 - protein, 7 aa, synthetic construct
SSSHRYS

SEQ ID NO: 8 - protein, 9 aa, synthetic construct
QQFKSYPLT

SEQ ID NO: 9 - protein, 119 aa, synthetic construct
QVQLVQSGAEVKKPGSSVKVSCKASGYSFTTYYIHWVRQAPGQGLEWMGWFFPGSGNIKYNEKFKGRVTITADTSTSTAYMELSSLRSEDTAVYYCAGSYYSYDVLDYWGQGTTVTVSS

SEQ ID NO: 10 - protein, 107 aa, synthetic construct
DIQMTQSPSFLSASVGDRVTITCKASQNVGINVVWHQQKPGKAPKALIYSSSHRYSGVPSRFSGSGSGTEFTLTISSLQPEDFATYFCQQFKSYPLTFGQGTKLEIK

SEQ ID NO: 11 - protein, 107 aa, synthetic construct
DIQMTQSPSSLSASVGDRVTITCKASQNVGINVVWHQQKPGKVPKALIYSSSHRYSGVPSRFSGSGSGTDFTLTISSLQPEDVATYFCQQFKSYPLTFGQGTKLEIK

SEQ ID NO: 12 - DNA, 357 bp, synthetic construct
  source 1..357: mol_type = other DNA
caggtgcagctggttcagtctggcgccgaagtgaagaaacctggctcctccgtgaaggtgtcctgcaaggcttccggctactccttcaccacctactacatccactgggtccgacaggcccctggacaaggattggaatggatgggctggttcttccccggctccggcaacatcaagtacaacgagaagttcaagggccgcgtgaccatcaccgccgacacctctacctctaccgcctacatggaactgtccagcctgagatctgaggacaccgccgtgtactactgcgccggctcctactactcttacgacgtgctggattactggggccagggcaccacagtgacagtgtcctct

SEQ ID NO: 13 - DNA, 321 bp, synthetic construct
  source 1..321: mol_type = other DNA
gacatccagatgacccagtctccatccttcctgtccgcctctgtgggcgacagagtgaccatcacatgcaaggcctctcagaacgtgggcatcaacgtcgtgtggcaccagcagaagcctggcaaggctcctaaggctctgatctactcctccagccaccggtactctggcgtgccctctagattttccggctctggctctggcaccgagtttaccctgacaatctccagcctgcagcctgaggacttcgccacctacttttgccagcagttcaagagctaccctctgacctttggccagggcaccaagctggaaatcaag

SEQ ID NO: 14 - DNA, 321 bp, synthetic construct
  source 1..321: mol_type = other DNA
gacatccagatgacccagtctccatcctctctgtccgcctctgtgggcgacagagtgaccatcacatgcaaggcctctcagaacgtgggcatcaacgtcgtgtggcaccagcagaaacctggcaaggtgcccaaggctctgatctactcctccagccacagatactccggcgtgccctctagattctccggctctggctctggcaccgactttaccctgacaatctccagcctgcagcctgaggacgtggccacctacttttgccagcagttcaagagctaccctctgacctttggccagggcaccaagctggaaatcaag

SEQ ID NO: 15 - protein, 117 aa, synthetic construct
DVQLVESGGGLVQPGGSRKLSCAASGFTFSNFGMHWVRQAPDKGLEWVAYISSGSSTIYYADTLKGRFTISRDNPKNTLFLQMTSLRSEDTAMYYCARRGEGAMDYWGQGTSVTVSS

SEQ ID NO: 16 - protein, 106 aa, synthetic construct
ENVLTQSPAIMSASLGEKVTMSCRASSSVNYIYWYQQKSDASPKLWIYYTSNLAPGVPTRFSGSGSGNSYSLTISSMEGEDAATYYCQQFTSSPFTFGSGTKLEIK

SEQ ID NO: 17 - protein, 10 aa, synthetic construct
GFTFSNFGMH

SEQ ID NO: 18 - protein, 17 aa, synthetic construct
YISSGSSTIYYADTLKG

SEQ ID NO: 19 - protein, 8 aa, synthetic construct
RGEGAMDY

SEQ ID NO: 20 - protein, 10 aa, synthetic construct
RASSSVNYIY

SEQ ID NO: 21 - protein, 7 aa, synthetic construct
YTSNLAP

SEQ ID NO: 22 - protein, 9 aa, synthetic construct
QQFTSSPFT

SEQ ID NO: 23 - protein, 117 aa, synthetic construct
EVQLVESGGGLVQPGGSLRLSCAASGFTFSNFGMHWVRQAPGKGLEWVSYISSGSSTIYYADTLKGRFTISRDNAKNSLYLQMNSLRAEDTAVYYCARRGEGAMDYWGQGTTVTVSS

SEQ ID NO: 24 - protein, 117 aa, synthetic construct
EVQLVESGGGLVQPGGSLRLSCAASGFTFSNFGMHWVRQAPGKGLEWVSYISSGSSTIYYADTLKGRFTISRDNSKNTLYLQMNSLRAEDTAVYYCARRGEGAMDYWGQGTTVTVSS

SEQ ID NO: 25 - protein, 117 aa, synthetic construct
QVQLVESGGGVVQPGRSLRLSCAASGFTFSNFGMHWVRQAPGKGLEWVAYISSGSSTIYYADTLKGRFTISRDNSKNTLYLQMNSLRAEDTAVYYCARRGEGAMDYWGQGTTVTVSS

SEQ ID NO: 26 - protein, 106 aa, synthetic construct
DNQLTQSPSFLSASVGDRVTITCRASSSVNYIYWYQQKPGKAPKLLIYYTSNLAPGVPSRFSGSGSGNEYTLTISSLQPEDFATYYCQQFTSSPFTFGQGTKLEIK

SEQ ID NO: 27 - protein, 106 aa, synthetic construct
DNQLTQSPSSLSASVGDRVTITCRASSSVNYIYWYQQKPGKAPKLLIYYTSNLAPGVPSRFSGSGSGNDYTLTISSLQPEDFATYYCQQFTSSPFTFGQGTKLEIK

SEQ ID NO: 28 - protein, 106 aa, synthetic construct
ENVLTQSPATLSVSPGERATLSCRASSSVNYIYWYQQKPGQAPRLLIYYTSNLAPGIPARFSGSGSGNEYTLTISSLQSEDFAVYYCQQFTSSPFTFGQGTKLEIK

SEQ ID NO: 29 - protein, 105 aa, synthetic construct
QNVLTQPPSASGTPGQRVTISCRASSSVNYIYWYQQLPGTAPKLLIYYTSNLAPGVPDRFSGSGSGNSYSLAISGLRSEDEADYYCQQFTSSPFTFGTGTKVTVL

SEQ ID NO: 30 - protein, 105 aa, synthetic construct
SNELTQPPSVSVSPGQTARITCRASSSVNYIYWYQQKSGQAPVLVIYYTSNLAPGIPERFSGSGSGNMYTLTISGAQVEDEADYYCQQFTSSPFTFGTGTKVTVL

SEQ ID NO: 31 - DNA, 351 bp, synthetic construct
  source 1..351: mol_type = other DNA
gaggtgcagctggttgaatctggcggaggattggttcagcctggcggctctctgagactgtcttgtgccgcttctggcttcaccttctccaacttcggcatgcactgggtccgacaggcccctggaaaaggactggaatgggtgtcctacatctcctccggctcctccaccatctactacgctgacaccctgaagggcagattcaccatctctcgggacaacgccaagaactccctgtacctgcagatgaacagcctgagagccgaggacaccgccgtgtactactgtgctagaagaggcgagggcgccatggattattggggccagggaaccacagtgaccgtgtctagc

SEQ ID NO: 32 - DNA, 351 bp, synthetic construct
  source 1..351: mol_type = other DNA
gaggtgcagctggttgaatctggcggaggattggttcagcctggcggctctctgagactgtcttgtgccgcttctggcttcaccttctccaacttcggcatgcactgggtccgacaggcccctggaaaaggactggaatgggtgtcctacatctcctccggctcctccaccatctactacgctgacaccctgaagggcagattcaccatcagccgggacaactccaagaacaccctgtacctgcagatgaactccctgagagccgaggacaccgccgtgtactactgtgctagaagaggcgagggcgccatggattattggggccagggaaccacagtgaccgtgtctagc

SEQ ID NO: 33 - DNA, 351 bp, synthetic construct
  source 1..351: mol_type = other DNA
caggtgcagctggtggaatctggtggcggagttgtgcagcctggcagatccctgagactgtcttgtgccgcctctggcttcaccttctccaacttcggcatgcactgggtccgacaggcccctggaaaaggattggagtgggtcgcctacatctcctccggctcctccaccatctactacgctgacaccctgaagggcagattcaccatcagccgggacaactccaagaacaccctgtacctgcagatgaactccctgagagccgaggacaccgccgtgtactactgtgctagaagaggcgagggcgccatggattattggggccagggaaccacagtgaccgtgtctagc

SEQ ID NO: 34 - DNA, 318 bp, synthetic construct
  source 1..318: mol_type = other DNA
gataaccagctgacccagtctcctagcttcctgtctgcctctgtgggcgacagagtgacaattacctgccgggcctcctcctccgtgaactacatctactggtatcagcagaagcccggcaaggcccctaagctgctgatctactacacctccaatctggcccctggcgtgccctctagattttccggatctggctccggcaacgagtataccctgacaatctccagcctgcagcctgaggacttcgccacctactactgccagcagttcacctcctctccattcacctttggccagggcaccaagctggaaatcaaa

SEQ ID NO: 35 - DNA, 317 bp, synthetic construct
  source 1..317: mol_type = other DNA
ataaccagctgacccagtctccttccagcctgtctgcttctgtgggcgacagagtgacaattacctgccgggcctcctcctccgtgaactacatctactggtatcagcagaagcccggcaaggcccctaagctgctgatctactacacctccaatctggcccctggcgtgccctctagattttccggatctggctccggcaacgactataccctgacaatctccagcctgcagcctgaggacttcgccacctactactgccagcagttcacctcctctccattcacctttggccagggcaccaagctggaaatcaaa

SEQ ID NO: 36 - DNA, 318 bp, synthetic construct
  source 1..318: mol_type = other DNA
gagaatgtgctgacccagtctcctgccacactgtctgttagccctggcgagagagctaccctgagctgcagagcctcttcctccgtgaactacatctactggtatcagcagaagcccggccaggctcctagactgctgatctactacacctccaatctggcccctggcatccctgccagattttccggatctggctccggcaacgagtataccctgaccatctccagcctgcagtccgaggactttgctgtgtactattgccagcagttcacaagcagccctttcacctttggccagggcaccaagctggaaatcaaa

SEQ ID NO: 37 - DNA, 315 bp, synthetic construct
  source 1..315: mol_type = other DNA
cagaatgtgctgacccaacctccttccgcctctggcacacctggacagagagtgacaatctcctgccgggcctcctcctccgtgaactacatctactggtatcagcagctgcccggcaccgctcctaaactgctgatctactacacctccaatctggcccctggcgtgcccgatagattttccggatctggctccggcaactcctacagcctggctatctctggcctgagatctgaggacgaggccgactactactgccagcagttcacctcctctccattcacctttggcaccggcaccaaagtgacagttctt

SEQ ID NO: 38 - DNA, 315 bp, synthetic construct
  source 1..315: mol_type = other DNA
tctaatgagctgacccagcctccttccgtgtccgtgtctcctggacagaccgccagaattacctgccgggcctcctcctccgtgaactacatctactggtatcagcagaagtccggccaggctcctgtgctcgtgatctactacacctccaatctggcccctggcatccctgagagattctccggatctggctccggcaacatgtacaccctgaccatctctggcgcccaggtggaagatgaggccgactactactgccagcagttcacctcctctccattcacctttggcaccggcaccaaagtgacagttctt

SEQ ID NO: 39 - protein, 107 aa, Homo sapiens [sequence omitted]

SEQ ID NO: 40 - protein, 326 aa, synthetic construct
ASTKGPSVFPLAPCSRSTSESTAALGCLVKDYFPEPVTVSWNSGALTSGVHTFPAVLQSSGLYSLSSVVTVPSSSLGTKTYTCNVDHKPSNTKVDKRVESKYGPPCPPCPAPEFLGGPSVFLFPPKPKDTLMISRTPEVTCVVVDVSQEDPEVQFNWYVDGVEVHNAKTKPREEQFNSTYRVVSVLTVLHQDWLNGKEYKCKVSNKGLPSSIEKTISKAKGQPREPQVYTLPPSQEEMTKNQVSLTCLVKGFYPSDIAVEWESNGQPENNYKTTPPVLDSDGSFFLYSRLTVDKSRWQEGNVFSCSVMHEALHNHYTQKSLSLSLG

SEQ ID NO: 41 - protein, 330 aa, Homo sapiens
ASTKGPSVFPLAPSSKSTSGGTAALGCLVKDYFPEPVTVSWNSGALTSGVHTFPAVLQSSGLYSLSSVVTVPSSSLGTQTYICNVNHKPSNTKVDKRVEPKSCDKTHTCPPCPAPELLGGPSVFLFPPKPKDTLMISRTPEVTCVVVDVSHEDPEVKFNWYVDGVEVHNAKTKPREEQYNSTYRVVSVLTVLHQDWLNGKEYKCKVSNKALPAPIEKTISKAKGQPREPQVYTLPPSREEMTKNQVSLTCLVKGFYPSDIAVEWESNGQPENNYKTTPPVLDSDGSFFLYSKLTVDKSRWQQGNVFSCSVMHEALHNHYTQKSLSLSPGK

SEQ ID NO: 42 - protein, 330 aa, synthetic construct
ASTKGPSVFPLAPSSKSTSGGTAALGCLVKDYFPEPVTVSWNSGALTSGVHTFPAVLQSSGLYSLSSVVTVPSSSLGTQTYICNVNHKPSNTKVDKRVEPKSCDKTHTCPPCPAPELLGGPSVFLFPPKPKDTLMISRTPEVTCVVVDVSHEDPEVKFNWYVDGVEVHNAKTKPREEQYASTYRVVSVLTVLHQDWLNGKEYKCKVSNKALPAPIEKTISKAKGQPREPQVYTLPPSREEMTKNQVSLTCLVKGFYPSDIAVEWESNGQPENNYKTTPPVLDSDGSFFLYSKLTVDKSRWQQGNVFSCSVMHEALHNHYTQKSLSLSPGK

SEQ ID NO: 43 - DNA, 344 bp, Homo sapiens
  source 1..344: mol_type = genomic DNA
atgagcatcggcctcctgtgctgtgcagccttgtctctcctgtgggcaggtccagtgaatgctggtgtcactcagaccccaaaattccaggtcctgaagacaggacagagcatgacactgcagtgtgcccaggatatgaaccatgaatacatgtcctggtatcgacaagacccaggcatggggctgaggctgattcattactcagttggtgctggtatcactgaccaaggagaagtccccaatggctacaatgtctccagatcaaccacagaggatttcccgctcaggctgctgtcggctgctccctcccagacatctgtgtacttctgtgccagcagttactc

SEQ ID NO: 44 - protein, 10 aa, synthetic construct
QFWASTNSAV

SEQ ID NO: 45 - protein, 5 aa, synthetic construct
TYYIH

SEQ ID NO: 46 - protein, 17 aa, synthetic construct
WFFPGSGNIKYNEKFKG

SEQ ID NO: 47 - protein, 10 aa, synthetic construct
SYYSYDVLDY

SEQ ID NO: 48 - protein, 7 aa, synthetic construct
GYSFTTY

SEQ ID NO: 49 - protein, 6 aa, synthetic construct
FPGSGN

SEQ ID NO: 50 - protein, 10 aa, synthetic construct
SYYSYDVLDY

SEQ ID NO: 51 - protein, 11 aa, synthetic construct
KASQNVGINVV

SEQ ID NO: 52 - protein, 7 aa, synthetic construct
SSSHRYS

SEQ ID NO: 53 - protein, 9 aa, synthetic construct
QQFKSYPLT

SEQ ID NO: 54 - protein, 11 aa, synthetic construct
KASQNVGINVV

SEQ ID NO: 55 - protein, 7 aa, synthetic construct
SSSHRYS

SEQ ID NO: 56 - protein, 9 aa, synthetic construct
QQFKSYPLT

SEQ ID NO: 57 - protein, 5 aa, synthetic construct
NFGMH

SEQ ID NO: 58 - protein, 17 aa, synthetic construct
YISSGSSTIYYADTLKG

SEQ ID NO: 59 - protein, 8 aa, synthetic construct
RGEGAMDY

SEQ ID NO: 60 - protein, 7 aa, synthetic construct
GFTFSNF

SEQ ID NO: 61 - protein, 6 aa, synthetic construct
SSGSST

SEQ ID NO: 62 - protein, 8 aa, synthetic construct
RGEGAMDY

SEQ ID NO: 63 - protein, 10 aa, synthetic construct
RASSSVNYIY

SEQ ID NO: 64 - protein, 7 aa, synthetic construct
YTSNLAP

SEQ ID NO: 65 - protein, 9 aa, synthetic construct
QQFTSSPFT

SEQ ID NO: 66 - protein, 10 aa, synthetic construct
RASSSVNYIY

SEQ ID NO: 67 - protein, 7 aa, synthetic construct
YTSNLAP

SEQ ID NO: 68 - protein, 9 aa, synthetic construct
QQFTSSPFT

SEQ ID NO: 69 - protein, 592 aa, synthetic construct
METDTLLLWVLLLWVPGSTGQVQLVQSGAEVKKPGSSVKVSCKASGYSFTTYYIHWVRQAPGQGLEWMGWFFPGSGNIKYNEKFKGRVTITADTSTSTAYMELSSLRSEDTAVYYCAGSYYSYDVLDYWGQGTTVTVSSGSASAPTLFPLVSCENSPSDTSSVAVGCLAQDFLPDSITFSWKYKNNSDISSTRGFPSVLRGGKYAATSQVLLPSKDVMQGTDEHVVCKVQHPNGNKEKNVPLPVIAELPPKVSVFVPPRDGFFGNPRKSKLICQATGFSPRQIQVSWLREGKQVGSGVTTDQVQAEAKESGPTTYKVTSTLTIKESDWLGQSMFTCRVDHRGLTFQQNASSMCVPDQDTAIRVFAIPPSFASIFLTKSTKLTCLVTDLTTYDSVTISWTRQNGEAVKTHTNISESHPNATFSAVGEASICEDDWNSGERFTCTVTHTDLASSLKQTISRPKGVALHRPDVYLLPPAREQLNLRESATITCLVTGFSPADVFVQWMQRGQPLSPEKYVTSAPMPEPQAPGRYFAHSILTVSEEEWNTGETYTCVVAHEALPNRVTERTVDKSTGKPTLYNVSLVMSDTAGTCY

SEQ ID NO: 70 - protein, 492 aa, synthetic construct
METDTLLLWVLLLWVPGSTGQVQLVQSGAEVKKPGSSVKVSCKASGYSFTTYYIHWVRQAPGQGLEWMGWFFPGSGNIKYNEKFKGRVTITADTSTSTAYMELSSLRSEDTAVYYCAGSYYSYDVLDYWGQGTTVTVSSASPTSPKVFPLSLCSTQPDGNVVIACLVQGFFPQEPLSVTWSESGQGVTARNFPPSQDASGDLYTTSSQLTLPATQCLAGKSVTCHVKHYTNPSQDVTVPCPVPSTPPTPSPSTPPTPSPSCCHPRLSLHRPALEDLLLGSEANLTCTLTGLRDASGVTFTWTPSSGKSAVQGPPERDLCGCYSVSSVLPGCAEPWNHGKTFTCTAAYPESKTPLTATLSKSGNTFRPEVHLLPPPSEELALNELVTLTCLARGFSPKDVLVRWLQGSQELPREKYLTWASRQEPSQGTTTFAVTSILRVAAEDWKKGDTFSCMVGHEALPLAFTQKTIDRLAGKPTHVNVSVVMAEVDGTCY

SEQ ID NO: 71 - protein, 479 aa, synthetic construct
METDTLLLWVLLLWVPGSTGQVQLVQSGAEVKKPGSSVKVSCKASGYSFTTYYIHWVRQAPGQGLEWMGWFFPGSGNIKYNEKFKGRVTITADTSTSTAYMELSSLRSEDTAVYYCAGSYYSYDVLDYWGQGTTVTVSSASPTSPKVFPLSLDSTPQDGNVVVACLVQGFFPQEPLSVTWSESGQNVTARNFPPSQDASGDLYTTSSQLTLPATQCPDGKSVTCHVKHYTNSSQDVTVPCRVPPPPPCCHPRLSLHRPALEDLLLGSEANLTCTLTGLRDASGATFTWTPSSGKSAVQGPPERDLCGCYSVSSVLPGCAQPWNHGETFTCTAAHPELKTPLTANITKSGNTFRPEVHLLPPPSEELALNELVTLTCLARGFSPKDVLVRWLQGSQELPREKYLTWASRQEPSQGTTTYAVTSILRVAAEDWKKGETFSCMVGHEALPLAFTQKTIDRMAGKPTHINVSVVMAEADGTCY

SEQ ID NO: 72 - protein, 234 aa, synthetic construct
METDTLLLWVLLLWVPGSTGDIQMTQSPSFLSASVGDRVTITCKASQNVGINVVWHQQKPGKAPKALIYSSSHRYSGVPSRFSGSGSGTEFTLTISSLQPEDFATYFCQQFKSYPLTFGQGTKLEIKRTVAAPSVFIFPPSDEQLKSGTASVVCLLNNFYPREAKVQWKVDNALQSGNSQESVTEQDSKDSTYSLSSTLTLSKADYEKHKVYACEVTHQGLSSPVTKSFNRGEC

SEQ ID NO: 73 - protein, 453 aa, Homo sapiens
GSASAPTLFPLVSCENSPSDTSSVAVGCLAQDFLPDSITFSWKYKNNSDISSTRGFPSVLRGGKYAATSQVLLPSKDVMQGTDEHVVCKVQHPNGNKEKNVPLPVIAELPPKVSVFVPPRDGFFGNPRKSKLICQATGFSPRQIQVSWLREGKQVGSGVTTDQVQAEAKESGPTTYKVTSTLTIKESDWLGQSMFTCRVDHRGLTFQQNASSMCVPDQDTAIRVFAIPPSFASIFLTKSTKLTCLVTDLTTYDSVTISWTRQNGEAVKTHTNISESHPNATFSAVGEASICEDDWNSGERFTCTVTHTDLASSLKQTISRPKGVALHRPDVYLLPPAREQLNLRESATITCLVTGFSPADVFVQWMQRGQPLSPEKYVTSAPMPEPQAPGRYFAHSILTVSEEEWNTGETYTCVVAHEALPNRVTERTVDKSTGKPTLYNVSLVMSDTAGTCY

SEQ ID NO: 74 - protein, 353 aa, Homo sapiens
ASPTSPKVFPLSLCSTQPDGNVVIACLVQGFFPQEPLSVTWSESGQGVTARNFPPSQDASGDLYTTSSQLTLPATQCLAGKSVTCHVKHYTNPSQDVTVPCPVPSTPPTPSPSTPPTPSPSCCHPRLSLHRPALEDLLLGSEANLTCTLTGLRDASGVTFTWTPSSGKSAVQGPPERDLCGCYSVSSVLPGCAEPWNHGKTFTCTAAYPESKTPLTATLSKSGNTFRPEVHLLPPPSEELALNELVTLTCLARGFSPKDVLVRWLQGSQELPREKYLTWASRQEPSQGTTTFAVTSILRVAAEDWKKGDTFSCMVGHEALPLAFTQKTIDRLAGKPTHVNVSVVMAEVDGTCY

SEQ ID NO: 75 - protein, 340 aa, Homo sapiens
ASPTSPKVFPLSLDSTPQDGNVVVACLVQGFFPQEPLSVTWSESGQNVTARNFPPSQDASGDLYTTSSQLTLPATQCPDGKSVTCHVKHYTNSSQDVTVPCRVPPPPPCCHPRLSLHRPALEDLLLGSEANLTCTLTGLRDASGATFTWTPSSGKSAVQGPPERDLCGCYSVSSVLPGCAQPWNHGETFTCTAAHPELKTPLTANITKSGNTFRPEVHLLPPPSEELALNELVTLTCLARGFSPKDVLVRWLQGSQELPREKYLTWASRQEPSQGTTTYAVTSILRVAAEDWKKGETFSCMVGHEALPLAFTQKTIDRMAGKPTHINVSVVMAEADGTCY

SEQ ID NO: 76 - protein, 159 aa, Homo sapiens
MKNHLLFWGVLAVFIKAVHVKAQEDERIVLVDNKCKCARITSRIIRSSEDPNEDIVERNIRIIVPLNNRENISDPTSPLRTRFVYHLSDLCKKCDPTEVELDNQIVTATQSNICDEDSATETCYTYDRNKCYTAVVPLVYGGETKMVETALTPDACYPD

SEQ ID NO: 77 - protein, 24 aa, synthetic construct
AEAAAKEAAAKEAAAKEAAAKAAA

SEQ ID NO: 78 - protein, 29 aa, synthetic construct
AEAAAKEAAAKEAAAKEAAAKEAAAKAAA

SEQ ID NO: 79 - protein, 122 aa, synthetic construct
QIQLQESGPGLVKPSETLSLTCTTSGYSFTSYYMHWIRQPPGKGLEWIGFIDPFKVITGYNHNFRGRVTISVDRSKTQASLKLSSVTAADTAVYYCARRYYSDYDGYALDYWGQGTLVTVSS

SEQ ID NO: 80 - protein, 246 aa, synthetic construct
QVQLVQSGAEVKKPGSSVKVSCKASGTDFKLTYIHWVRQAPGQGLEWMGRVSPGSGNTKYNEKFKGRVTITADTSTSTAYMELSSLRSEDTAVYYCAGSYYSYDVLDYWGQGTTVTVSSGGGGSGGGGSGGGGSGGGGSDIQMTQSPSFLSASVGDRVTITCKASQNVEDRVAWYQQKPGKAPKALIYSSSHRYKGVPSRFSGSGSGTEFTLTISSLQPEDFATYFCQQFKSYPLTFGQGTKLEIK

SEQ ID NO: 81 - protein, 107 aa, synthetic construct
DIQMTQSPSFLSASVGDRVTITCKASQNVEDRVAWYQQKPGKAPKALIYSSSHRYKGVPSRFSGSGSGTEFTLTISSLQPEDFATYFCQQFKSYPLTFGQGTKLEIK

SEQ ID NO: 82 - protein, 119 aa, synthetic construct
QVQLVQSGAEVKKPGSSVKVSCKASGTDFKLTYIHWVRQAPGQGLEWMGRVSPGSGNTKYNEKFKGRVTITADTSTSTAYMELSSLRSEDTAVYYCAGSYYSYDVLDYWGQGTTVTVSS

SEQ ID NO: 83 - protein, 246 aa, synthetic construct
QVQLVQSGAEVKKPGSSVKVSCKASGTDFDKIYIHWVRQAPGQGLEWMGRISAGSGNVKYNEKFKGRVTITADTSTSTAYMELSSLRSEDTAVYYCAGSYYSYDVLDYWGQGTTVTVSSGGGGSGGGGSGGGGSGGGGSDIQMTQSPSFLSASVGDRVTITCKASQNVEDRVAWYQQKPGKAPKALIYSSSHRYKGVPSRFSGSGSGTEFTLTISSLQPEDFATYFCQQFKSYPLTFGQGTKLEIK

SEQ ID NO: 84 - protein, 107 aa, synthetic construct; identical to SEQ ID NO: 81

SEQ ID NO: 85 - protein, 119 aa, synthetic construct
QVQLVQSGAEVKKPGSSVKVSCKASGTDFDKIYIHWVRQAPGQGLEWMGRISAGSGNVKYNEKFKGRVTITADTSTSTAYMELSSLRSEDTAVYYCAGSYYSYDVLDYWGQGTTVTVSS

SEQ ID NO: 86 - protein, 246 aa, synthetic construct
QVQLVQSGAEVKKPGSSVKVSCKASGHDFRDFYIHWVRQAPGQGLEWMGRVYPGSGSYRYNEKFKGRVTITADTSTSTAYMELSSLRSEDTAVYYCAGSYYSYDVLDYWGQGTTVTVSSGGGGSGGGGSGGGGSGGGGSDIQMTQSPSFLSASVGDRVTITCKASQNVDDRVAWYQQKPGKAPKALIYSSSHRYKGVPSRFSGSGSGTEFTLTISSLQPEDFATYFCQQFKSYPLTFGQGTKLEIK

SEQ ID NO: 87 - protein, 107 aa, synthetic construct
DIQMTQSPSFLSASVGDRVTITCKASQNVDDRVAWYQQKPGKAPKALIYSSSHRYKGVPSRFSGSGSGTEFTLTISSLQPEDFATYFCQQFKSYPLTFGQGTKLEIK

SEQ ID NO: 88 - protein, 119 aa, synthetic construct
QVQLVQSGAEVKKPGSSVKVSCKASGHDFRDFYIHWVRQAPGQGLEWMGRVYPGSGSYRYNEKFKGRVTITADTSTSTAYMELSSLRSEDTAVYYCAGSYYSYDVLDYWGQGTTVTVSS

SEQ ID NO: 89 - protein, 246 aa, synthetic construct
QVQLVQSGAEVKKPGSSVKVSCKASGHDFKLTYIHWVRQAPGQGLEWMGRISAGSGNVKYNEKFKGRVTITADTSTSTAYMELSSLRSEDTAVYYCAGSYYSYDVLDYWGQGTTVTVSSGGGGSGGGGSGGGGSGGGGSDIQMTQSPSFLSASVGDRVTITCKASQNVDNRVAWYQQKPGKAPKALIYSSSHRYKGVPSRFSGSGSGTEFTLTISSLQPEDFATYFCQQFKSYPLTFGQGTKLEIK

SEQ ID NO: 90 - protein, 107 aa, synthetic construct
DIQMTQSPSFLSASVGDRVTITCKASQNVDNRVAWYQQKPGKAPKALIYSSSHRYKGVPSRFSGSGSGTEFTLTISSLQPEDFATYFCQQFKSYPLTFGQGTKLEIK

SEQ ID NO: 91 - protein, 119 aa, synthetic construct
QVQLVQSGAEVKKPGSSVKVSCKASGHDFKLTYIHWVRQAPGQGLEWMGRISAGSGNVKYNEKFKGRVTITADTSTSTAYMELSSLRSEDTAVYYCAGSYYSYDVLDYWGQGTTVTVSS

SEQ ID NO: 92 - protein, 246 aa, synthetic construct
QVQLVQSGAEVKKPGSSVKVSCKASGTDFKLTYIHWVRQAPGQGLEWMGRIFPGSGNVKYNEKFKGRVTITADTSTSTAYMELSSLRSEDTAVYYCAGSYYSYDVLDYWGQGTTVTVSSGGGGSGGGGSGGGGSGGGGSDIQMTQSPSFLSASVGDRVTITCKASQNVENKVAWHQQKPGKAPKALIYSSSHRYKGVPSRFSGSGSGTEFTLTISSLQPEDFATYFCQQFKSYPLTFGQGTKLEIK

SEQ ID NO: 93 - protein, 107 aa, synthetic construct
DIQMTQSPSFLSASVGDRVTITCKASQNVENKVAWHQQKPGKAPKALIYSSSHRYKGVPSRFSGSGSGTEFTLTISSLQPEDFATYFCQQFKSYPLTFGQGTKLEIK

SEQ ID NO: 94 - protein, 119 aa, synthetic construct
QVQLVQSGAEVKKPGSSVKVSCKASGTDFKLTYIHWVRQAPGQGLEWMGRIFPGSGNVKYNEKFKGRVTITADTSTSTAYMELSSLRSEDTAVYYCAGSYYSYDVLDYWGQGTTVTVSS

SEQ ID NO: 95 - protein, 246 aa, synthetic construct
QVQLVQSGAEVKKPGSSVKVSCKASGTDFDKIYIHWVRQAPGQGLEWMGRIFAGSGNTKYNEKFKGRVTITADTSTSTAYMELSSLRSEDTAVYYCAGSYYSYDVLDYWGQGTTVTVSSGGGGSGGGGSGGGGSGGGGSDIQMTQSPSFLSASVGDRVTITCKASQNVDDRVAWYQQKPGKAPKALIYSSSHRYKGVPSRFSGSGSGTEFTLTISSLQPEDFATYFCQQFKSYPLTFGQGTKLEIK

SEQ ID NO: 96 - protein, 107 aa, synthetic construct; identical to SEQ ID NO: 87

SEQ ID NO: 97 - protein, 119 aa, synthetic construct
QVQLVQSGAEVKKPGSSVKVSCKASGTDFDKIYIHWVRQAPGQGLEWMGRIFAGSGNTKYNEKFKGRVTITADTSTSTAYMELSSLRSEDTAVYYCAGSYYSYDVLDYWGQGTTVTVSS

SEQ ID NO: 98 - protein, 246 aa, synthetic construct
QVQLVQSGAEVKKPGSSVKVSCKASGHDFDKFYIHWVRQAPGQGLEWMGRVSAGSGNVKYNEKFKGRVTITADTSTSTAYMELSSLRSEDTAVYYCAGSYYSYDVLDYWGQGTTVTVSSGGGGSGGGGSGGGGSGGGGSDIQMTQSPSFLSASVGDRVTITCKASQNVGNRVAWYQQKPGKAPKALIYSSSHRYSGVPSRFSGSGSGTEFTLTISSLQPEDFATYFCQQFKSYPLTFGQGTKLEIK

SEQ ID NO: 99 - protein, 107 aa, synthetic construct
DIQMTQSPSFLSASVGDRVTITCKASQNVGNRVAWYQQKPGKAPKALIYSSSHRYSGVPSRFSGSGSGTEFTLTISSLQPEDFATYFCQQFKSYPLTFGQGTKLEIK

SEQ ID NO: 100 - protein, 119 aa, synthetic construct
QVQLVQSGAEVKKPGSSVKVSCKASGHDFDKFYIHWVRQAPGQGLEWMGRVSAGSGNVKYNEKFKGRVTITADTSTSTAYMELSSLRSEDTAVYYCAGSYYSYDVLDYWGQGTTVTVSS

SEQ ID NO: 101 - protein, 247 aa, synthetic construct
QVQLVQSGAEVKKPGSSVKVSCKASGHDFDKFYIHWVRQAPGQGLEWMGRIFAGSGNVKYNEKFKGRVTITADTSTSTAYMELSSLRSEDTAVYYCAGSYYSYDVLDYWGQGTTVTVSSGGGGSGGGGSGGGGSGGGGSDIQMTQSPSFLSASVGDRVTITCKASQNVGDRVAWYQQKPGKAPKALIYSSSHRYKGVPSRFSGSGSGTEFTLTISSLQPEDFATYFCQQFKSYPLTFGQGTKLEIKS

SEQ ID NO: 102 - protein, 107 aa, synthetic construct
DIQMTQSPSFLSASVGDRVTITCKASQNVGDRVAWYQQKPGKAPKALIYSSSHRYKGVPSRFSGSGSGTEFTLTISSLQPEDFATYFCQQFKSYPLTFGQGTKLEIK

SEQ ID NO: 103 - protein, 119 aa, synthetic construct
QVQLVQSGAEVKKPGSSVKVSCKASGHDFDKFYIHWVRQAPGQGLEWMGRIFAGSGNVKYNEKFKGRVTITADTSTSTAYMELSSLRSEDTAVYYCAGSYYSYDVLDYWGQGTTVTVSS

SEQ ID NO: 104 - protein, 246 aa, synthetic construct
QVQLVQSGAEVKKPGSSVKVSCKASGTDFKLTYIHWVRQAPGQGLEWMGRVSPGSGNVKYNEKFKGRVTITADTSTSTAYMELSSLRSEDTAVYYCAGSYYSYDVLDYWGQGTTVTVSSGGGGSGGGGSGGGGSGGGGSDIQMTQSPSFLSASVGDRVTITCKASQNVGDRVAWYQQKPGKAPKALIYSSSHRYKGVPSRFSGSGSGTEFTLTISSLQPEDFATYFCQQFKSYPLTFGQGTKLEIK

SEQ ID NO: 105 - protein, 107 aa, synthetic construct; identical to SEQ ID NO: 102

SEQ ID NO: 106 - protein, 119 aa, synthetic construct
QVQLVQSGAEVKKPGSSVKVSCKASGTDFKLTYIHWVRQAPGQGLEWMGRVSPGSGNVKYNEKFKGRVTITADTSTSTAYMELSSLRSEDTAVYYCAGSYYSYDVLDYWGQGTTVTVSS

SEQ ID NO: 107 - protein, 246 aa, synthetic construct
QVQLVQSGAEVKKPGSSVKVSCKASGTDFDKIYIHWVRQAPGQGLEWMGRVSAGSGNTKYNEKFKGRVTITADTSTSTAYMELSSLRSEDTAVYYCAGSYYSYDVLDYWGQGTTVTVSSGGGGSGGGGSGGGGSGGGGSDIQMTQSPSFLSASVGDRVTITCKASQNVGNRVAWYQQKPGKAPKALIYSSSHRYKGVPSRFSGSGSGTEFTLTISSLQPEDFATYFCQQFKSYPLTFGQGTKLEIK

SEQ ID NO: 108 - protein, 107 aa, synthetic construct
DIQMTQSPSFLSASVGDRVTITCKASQNVGNRVAWYQQKPGKAPKALIYSSSHRYKGVPSRFSGSGSGTEFTLTISSLQPEDFATYFCQQFKSYPLTFGQGTKLEIK

SEQ ID NO: 109 - protein, 119 aa, synthetic construct
QVQLVQSGAEVKKPGSSVKVSCKASGTDFDKIYIHWVRQAPGQGLEWMGRVSAGSGNTKYNEKFKGRVTITADTSTSTAYMELSSLRSEDTAVYYCAGSYYSYDVLDYWGQGTTVTVSS

SEQ ID NO: 110 - protein, 246 aa, synthetic construct
QVQLVQSGAEVKKPGSSVKVSCKASGTDFKLTYIHWVRQAPGQGLEWMGRIFPGSGNVKYNEKFKGRVTITADTSTSTAYMELSSLRSEDTAVYYCAGSYYSYDVLDYWGQGTTVTVSSGGGGSGGGGSGGGGSGGGGSDIQMTQSPSFLSASVGDRVTITCKASQNVDNRVAWYQQKPGKAPKALIYSSSHRYKGVPSRFSGSGSGTEFTLTISSLQPEDFATYFCQQFKSYPLTFGQGTKLEIK

SEQ ID NO: 111 - protein, 107 aa, synthetic construct; identical to SEQ ID NO: 90

SEQ ID NO: 112 - protein, 119 aa, synthetic construct; identical to SEQ ID NO: 94

SEQ ID NO: 113 - protein, 246 aa, synthetic construct
QVQLVQSGAEVKKPGSSVKVSCKASGTDFDKIYIHWVRQAPGQGLEWMGRISAGSGNTKYNEKFKGRVTITADTSTSTAYMELSSLRSEDTAVYYCAGSYYSYDVLDYWGQGTTVTVSSGGGGSGGGGSGGGGSGGGGSDIQMTQSPSFLSASVGDRVTITCKASQNVDDRVAWYQQKPGKAPKALIYSSSHRYKGVPSRFSGSGSGTEFTLTISSLQPEDFATYFCQQFKSYPLTFGQGTKLEIK

SEQ ID NO: 114 - protein, 107 aa, synthetic construct; identical to SEQ ID NO: 87

SEQ ID NO: 115 - protein, 119 aa, synthetic construct
QVQLVQSGAEVKKPGSSVKVSCKASGTDFDKIYIHWVRQAPGQGLEWMGRISAGSGNTKYNEKFKGRVTITADTSTSTAYMELSSLRSEDTAVYYCAGSYYSYDVLDYWGQGTTVTVSS

SEQ ID NO: 116 - protein, 246 aa, synthetic construct
QVQLVQSGAEVKKPGSSVKVSCKASGTDFRLTYIHWVRQAPGQGLEWMGRVSPGSGNTKYNEKFKGRVTITADTSTSTAYMELSSLRSEDTAVYYCAGSYYSYDVLDYWGQGTTVTVSSGGGGSGGGGSGGGGSGGGGSDIQMTQSPSFLSASVGDRVTITCKASQNVDNKVAWHQQKPGKAPKALIYSSSHRYKGVPSRFSGSGSGTEFTLTISSLQPEDFATYFCQQFKSYPLTFGQGTKLEIK

SEQ ID NO: 117 - protein, 107 aa, synthetic construct
DIQMTQSPSFLSASVGDRVTITCKASQNVDNKVAWHQQKPGKAPKALIYSSSHRYKGVPSRFSGSGSGTEFTLTISSLQPEDFATYFCQQFKSYPLTFGQGTKLEIK

SEQ ID NO: 118 - protein, 119 aa, synthetic construct
QVQLVQSGAEVKKPGSSVKVSCKASGTDFRLTYIHWVRQAPGQGLEWMGRVSPGSGNTKYNEKFKGRVTITADTSTSTAYMELSSLRSEDTAVYYCAGSYYSYDVLDYWGQGTTVTVSS

SEQ ID NO: 119 - protein, 246 aa, synthetic construct
QVQLVQSGAEVKKPGSSVKVSCKASGGTFRLTYIHWVRQAPGQGLEWMGRVYPGSGNTKYNEKFKGRVTITADTSTSTAYMELSSLRSEDTAVYYCAGSYYSYDVLDYWGQGTTVTVSSGGGGSGGGGSGGGGSGGGGSDIQMTQSPSFLSASVGDRVTITCKASQNVDDRVAWYQQKPGKAPKALIYSSSHRYKGVPSRFSGSGSGTEFTLTISSLQPEDFATYFCQQFKSYPLTFGQGTKLEIK

SEQ ID NO: 120 - protein, 107 aa, synthetic construct; identical to SEQ ID NO: 87

SEQ ID NO: 121 - protein, 119 aa, synthetic construct
QVQLVQSGAEVKKPGSSVKVSCKASGGTFRLTYIHWVRQAPGQGLEWMGRVYPGSGNTKYNEKFKGRVTITADTSTSTAYMELSSLRSEDTAVYYCAGSYYSYDVLDYWGQGTTVTVSS

SEQ ID NO: 122 - protein, 246 aa, synthetic construct
QVQLVQSGAEVKKPGSSVKVSCKASGTDFRLTYIHWVRQAPGQGLEWMGRIFPGSGNTKYNEKFKGRVTITADTSTSTAYMELSSLRSEDTAVYYCAGSYYSYDVLDYWGQGTTVTVSSGGGGSGGGGSGGGGSGGGGSDIQMTQSPSFLSASVGDRVTITCKASQNVDDRVAWYQQKPGKAPKALIYSSSHRYKGVPSRFSGSGSGTEFTLTISSLQPEDFATYFCQQFKSYPLTFGQGTKLEIK

SEQ ID NO: 123 - protein, 107 aa, synthetic construct; identical to SEQ ID NO: 87

SEQ ID NO: 124 - protein, 119 aa, synthetic construct
QVQLVQSGAEVKKPGSSVKVSCKASGTDFRLTYIHWVRQAPGQGLEWMGRIFPGSGNTKYNEKFKGRVTITADTSTSTAYMELSSLRSEDTAVYYCAGSYYSYDVLDYWGQGTTVTVSS

SEQ ID NO: 125 - protein, 246 aa, synthetic construct
QVQLVQSGAEVKKPGSSVKVSCKASGTDFKLTYIHWVRQAPGQGLEWMGRIFPGSGNVKYNEKFKGRVTITADTSTSTAYMELSSLRSEDTAVYYCAGSYYSYDVLDYWGQGTTVTVSSGGGGSGGGGSGGGGSGGGGSDIQMTQSPSFLSASVGDRVTITCKASQNVEDRVAWYQQKPGKAPKALIYSSSHRYKGVPSRFSGSGSGTEFTLTISSLQPEDFATYFCQQFKSYPLTFGQGTKLEIK

SEQ ID NO: 126 - protein, 107 aa, synthetic construct; identical to SEQ ID NO: 81

SEQ ID NO: 127 - protein, 119 aa, synthetic construct; identical to SEQ ID NO: 94

SEQ ID NO: 128 - protein, 246 aa, synthetic construct
QVQLVQSGAEVKKPGSSVKVSCKASGGTFRLTYIHWVRQAPGQGLEWMGRISAGSGNVKYNEKFKGRVTITADTSTSTAYMELSSLRSEDTAVYYCAGSYYSYDVLDYWGQGTTVTVSSGGGGSGGGGSGGGGSGGGGSDIQMTQSPSFLSASVGDRVTITCKASQNVGDRVAWYQQKPGKAPKALIYSSSHRYKGVPSRFSGSGSGTEFTLTISSLQPEDFATYFCQQFKSYPLTFGQGTKLEIK

SEQ ID NO: 129 - protein, 107 aa, synthetic construct; identical to SEQ ID NO: 102

SEQ ID NO: 130 - protein, 119 aa, synthetic construct
QVQLVQSGAEVKKPGSSVKVSCKASGGTFRLTYIHWVRQAPGQGLEWMGRISAGSGNVKYNEKFKGRVTITADTSTSTAYMELSSLRSEDTAVYYCAGSYYSYDVLDYWGQGTTVTVSS

SEQ ID NO: 131 - protein, 246 aa, synthetic construct
QVQLVQSGAEVKKPGSSVKVSCKASGGTFDKTYIHWVRQAPGQGLEWMGRISAGSGNTKYNEKFKGRVTITADTSTSTAYMELSSLRSEDTAVYYCAGSYYSYDVLDYWGQGTTVTVSSGGGGSGGGGSGGGGSGGGGSDIQMTQSPSFLSASVGDRVTITCKASQNVDDRVAWYQQKPGKAPKALIYSSSHRYKGVPSRFSGSGSGTEFTLTISSLQPEDFATYFCQQFKSYPLTFGQGTKLEIK

SEQ ID NO: 132 - protein, 107 aa, synthetic construct; identical to SEQ ID NO: 87

SEQ ID NO: 133 - protein, 119 aa, synthetic construct
QVQLVQSGAEVKKPGSSVKVSCKASGGTFDKTYIHWVRQAPGQGLEWMGRISAGSGNTKYNEKFKGRVTITADTSTSTAYMELSSLRSEDTAVYYCAGSYYSYDVLDYWGQGTTVTVSS

SEQ ID NO: 134 - protein, 246 aa, synthetic construct
QVQLVQSGAEVKKPGSSVKVSCKASGHDFDKFYIHWVRQAPGQGLEWMGRISAGSGNTKYNEKFKGRVTITADTSTSTAYMELSSLRSEDTAVYYCAGSYYSYDVLDYWGQGTTVTVSSGGGGSGGGGSGGGGSGGGGSDIQMTQSPSFLSASVGDRVTITCKASQNVDDRVAWYQQKPGKAPKALIYSSSHRYKGVPSRFSGSGSGTEFTLTISSLQPEDFATYFCQQFKSYPLTFGQGTKLEIK

SEQ ID NO: 135 - protein, 107 aa, synthetic construct; identical to SEQ ID NO: 87

SEQ ID NO: 136 - protein, 119 aa, synthetic construct
QVQLVQSGAEVKKPGSSVKVSCKASGHDFDKFYIHWVRQAPGQGLEWMGRISAGSGNTKYNEKFKGRVTITADTSTSTAYMELSSLRSEDTAVYYCAGSYYSYDVLDYWGQGTTVTVSS

SEQ ID NO: 137 - protein, 246 aa, synthetic construct
QVQLVQSGAEVKKPGSSVKVSCKASGTDFKLTYIHWVRQAPGQGLEWMGRISAGSGNVKYNEKFKGRVTITADTSTSTAYMELSSLRSEDTAVYYCAGSYYSYDVLDYWGQGTTVTVSSGGGGSGGGGSGGGGSGGGGSDIQMTQSPSFLSASVGDRVTITCKASQNVDNKVAWHQQKPGKAPKALIYSSSHRYKGVPSRFSGSGSGTEFTLTISSLQPEDFATYFCQQFKSYPLTFGQGTKLEIK

SEQ ID NO: 138 - protein, 107 aa, synthetic construct; identical to SEQ ID NO: 117

SEQ ID NO: 139 - protein, 119 aa, synthetic construct
QVQLVQSGAEVKKPGSSVKVSCKASGTDFKLTYIHWVRQAPGQGLEWMGRISAGSGNVKYNEKFKGRVTITADTSTSTAYMELSSLRSEDTAVYYCAGSYYSYDVLDYWGQGTTVTVSS

SEQ ID NO: 140 - protein, 246 aa, synthetic construct
QVQLVQSGAEVKKPGSSVKVSCKASGHDFRLTYIHWVRQAPGQGLEWMGRISAGSGNVKYNEKFKGRVTITADTSTSTAYMELSSLRSEDTAVYYCAGSYYSYDVLDYWGQGTTVTVSSGGGGSGGGGSGGGGSGGGGSDIQMTQSPSFLSASVGDRVTITCKASQNVADRVAWYQQKPGKAPKALIYSSSHRYKGVPSRFSGSGSGTEFTLTISSLQPEDFATYFCQQFKSYPLTFGQGTKLEIK

SEQ ID NO: 141 - protein, 107 aa, synthetic construct
DIQMTQSPSFLSASVGDRVTITCKASQNVADRVAWYQQKPGKAPKALIYSSSHRYKGVPSRFSGSGSGTEFTLTISSLQPEDFATYFCQQFKSYPLTFGQGTKLEIK

SEQ ID NO: 142 - protein, 119 aa, synthetic construct
QVQLVQSGAEVKKPGSSVKVSCKASGHDFRLTYIHWVRQAPGQGLEWMGRISAGSGNVKYNEKFKGRVTITADTSTSTAYMELSSLRSEDTAVYYCAGSYYSYDVLDYWGQGTTVTVSS

SEQ ID NO: 143 - protein, 246 aa, synthetic construct
QVQLVQSGAEVKKPGSSVKVSCKASGHDFHLWYIHWVRQAPGQGLEWMGRVSAGSGNVKYNEKFKGRVTITADTSTSTAYMELSSLRSEDTAVYYCAGSYYSYDVLDYWGQGTTVTVSSGGGGSGGGGSGGGGSGGGGSDIQMTQSPSFLSASVGDRVTITCKASQNVDNKVAWHQQKPGKAPKALIYSSSHRYKGVPSRFSGSGSGTEFTLTISSLQPEDFATYFCQQFKSYPLTFGQGTKLEIK

SEQ ID NO: 144 - protein, 107 aa, synthetic construct; identical to SEQ ID NO: 117

SEQ ID NO: 145 - protein, 119 aa, synthetic construct
QVQLVQSGAEVKKPGSSVKVSCKASGHDFHLWYIHWVRQAPGQGLEWMGRVSAGSGNVKYNEKFKGRVTITADTSTSTAYMELSSLRSEDTAVYYCAGSYYSYDVLDYWGQGTTVTVSS

SEQ ID NO: 146 - protein, 246 aa, synthetic construct
QVQLVQSGAEVKKPGSSVKVSCKASGHDFHLWYIHWVRQAPGQGLEWMGRVFAGSGNTKYNEKFKGRVTITADTSTSTAYMELSSLRSEDTAVYYCAGSYYSYDVLDYWGQGTTVTVSSGGGGSGGGGSGGGGSGGGGSDIQMTQSPSFLSASVGDRVTITCKASQNVEDKVAWYQQKPGKAPKALIYSSSHRYKGVPSRFSGSGSGTEFTLTISSLQPEDFATYFCQQFKSYPLTFGQGTKLEIK

SEQ ID NO: 147 - protein, 107 aa, synthetic construct
DIQMTQSPSFLSASVGDRVTITCKASQNVEDKVAWYQQKPGKAPKALIYSSSHRYKGVPSRFSGSGSGTEFTLTISSLQPEDFATYFCQQFKSYPLTFGQGTKLEIK

SEQ ID NO: 148 - protein, 119 aa, synthetic construct
QVQLVQSGAEVKKPGSSVKVSCKASGHDFHLWYIHWVRQAPGQGLEWMGRVFAGSGNTKYNEKFKGRVTITADTSTSTAYMELSSLRSEDTAVYYCAGSYYSYDVLDYWGQGTTVTVSS

SEQ ID NO: 149 - protein, 246 aa, synthetic construct
QVQLVQSGAEVKKPGSSVKVSCKASGTDFKLTYIHWVRQAPGQGLEWMGRIFPGSGNTKYNEKFKGRVTITADTSTSTAYMELSSLRSEDTAVYYCAGSYYSYDVLDYWGQGTTVTVSSGGGGSGGGGSGGGGSGGGGSDIQMTQSPSFLSASVGDRVTITCKASQNVDDRVAWYQQKPGKAPKALIYSSSHRYKGVPSRFSGSGSGTEFTLTISSLQPEDFATYFCQQFKSYPLTFGQGTKLEIK

SEQ ID NO: 150 - protein, 107 aa, synthetic construct; identical to SEQ ID NO: 87

SEQ ID NO: 151 - protein, 119 aa, synthetic construct
QVQLVQSGAEVKKPGSSVKVSCKASGTDFKLTYIHWVRQAPGQGLEWMGRIFPGSGNTKYNEKFKGRVTITADTSTSTAYMELSSLRSEDTAVYYCAGSYYSYDVLDYWGQGTTVTVSS

SEQ ID NO: 152 - protein, 51 aa, synthetic construct
RRRRQRTRRMMRTKMRMRRMRRTRRKMRRKMSPARPRTSCREACLQGWTEA

SEQ ID NO: 153 - protein, 246 aa, synthetic construct
QVQLVQSGAEVKKPGSSVKVSCKASGTDFKLTYIHWVRQAPGQGLEWMGRVSAGSGNVKYNEKFKGRVTITADTSTSTAYMELSSLRSEDTAVYYCAGSYYSYDVLDYWGQGTTVTVSSGGGGSGGGGSGGGGSGGGGSDIQMTQSPSFLSASVGDRVTITCKASQNVGNRVAWYQQKPGKAPKALIYSSSHRYKGVPSRFSGSGSGTEFTLTISSLQPEDFATYFCQQFKSYPLTFGQGTKLEIK

SEQ ID NO: 154 - protein, 107 aa, synthetic construct; identical to SEQ ID NO: 108

SEQ ID NO: 155 - protein, 119 aa, synthetic construct
QVQLVQSGAEVKKPGSSVKVSCKASGTDFKLTYIHWVRQAPGQGLEWMGRVSAGSGNVKYNEKFKGRVTITADTSTSTAYMELSSLRSEDTAVYYCAGSYYSYDVLDYWGQGTTVTVSS

SEQ ID NO: 156 - protein, 246 aa, synthetic construct
QVQLVQSGAEVKKPGSSVKVSCKASGTDFKLTYIHWVRQAPGQGLEWMGRISPGSGNTKYNEKFKGRVTITADTSTSTAYMELSSLRSEDTAVYYCAGSYYSYDVLDYWGQGTTVTVSSGGGGSGGGGSGGGGSGGGGSDIQMTQSPSFLSASVGDRVTITCKASQNVGDRVAWYQQKPGKAPKALIYSSSHRYKGVPSRFSGSGSGTEFTLTISSLQPEDFATYFCQQFKSYPLTFGQGTKLEIK

SEQ ID NO: 157 - protein, 107 aa, synthetic construct; identical to SEQ ID NO: 102

SEQ ID NO: 158 - protein, 119 aa, synthetic construct
QVQLVQSGAEVKKPGSSVKVSCKASGTDFKLTYIHWVRQAPGQGLEWMGRISPGSGNTKYNEKFKGRVTITADTSTSTAYMELSSLRSEDTAVYYCAGSYYSYDVLDYWGQGTTVTVSS

SEQ ID NO: 159 - protein, 246 aa, synthetic construct
QVQLVQSGAEVKKPGSSVKVSCKASGHDFHLWYIHWVRQAPGQGLEWMGRISPGSGNVKYNEKFKGRVTITADTSTSTAYMELSSLRSEDTAVYYCAGSYYSYDVLDYWGQGTTVTVSSGGGGSGGGGSGGGGSGGGGSDIQMTQSPSFLSASVGDRVTITCKASQNVGDRVAWHQQKPGKAPKALIYSSSHRYKGVPSRFSGSGSGTEFTLTISSLQPEDFATYFCQQFKSYPLTFGQGTKLEIK

SEQ ID NO: 160 - protein, 107 aa, synthetic construct
DIQMTQSPSFLSASVGDRVTITCKASQNVGDRVAWHQQKPGKAPKALIYSSSHRYKGVPSRFSGSGSGTEFTLTISSLQPEDFATYFCQQFKSYPLTFGQGTKLEIK

SEQ ID NO: 161 - protein, 119 aa, synthetic construct
QVQLVQSGAEVKKPGSSVKVSCKASGHDFHLWYIHWVRQAPGQGLEWMGRISPGSGNVKYNEKFKGRVTITADTSTSTAYMELSSLRSEDTAVYYCAGSYYSYDVLDYWGQGTTVTVSS

SEQ ID NO: 162 - protein, 246 aa, synthetic construct
QVQLVQSGAEVKKPGSSVKVSCKASGHDFKLTYIHWVRQAPGQGLEWMGRISAGSGNVKYNEKFKGRVTITADTSTSTAYMELSSLRSEDTAVYYCAGSYYSYDVLDYWGQGTTVTVSSGGGGSGGGGSGGGGSGGGGSDIQMTQSPSFLSASVGDRVTITCKASQNVDDRVAWYQQKPGKAPKALIYSSSHRYKGVPSRFSGSGSGTEFTLTISSLQPEDFATYFCQQFKSYPLTFGQGTKLEIK

SEQ ID NO: 163 - protein, 107 aa, synthetic construct; identical to SEQ ID NO: 87

SEQ ID NO: 164 - protein, 119 aa, synthetic construct; identical to SEQ ID NO: 91

SEQ ID NO: 165 - protein, 246 aa, synthetic construct
QVQLVQSGAEVKKPGSSVKVSCKASGTDFHLWYIHWVRQAPGQGLEWMGRVFAGSGSYRYNEKFKGRVTITADTSTSTAYMELSSLRSEDTAVYYCAGSYYSYDVLDYWGQGTTVTVSSGGGGSGGGGSGGGGSGGGGSDIQMTQSPSFLSASVGDRVTITCKASQNVDDRVAWYQQKPGKAPKALIYSSSHRYKGVPSRFSGSGSGTEFTLTISSLQPEDFATYFCQQFKSYPLTFGQGTKLEIK

SEQ ID NO: 166 - protein, 107 aa, synthetic construct; identical to SEQ ID NO: 87

SEQ ID NO: 167 - protein, 119 aa, synthetic construct
QVQLVQSGAEVKKPGSSVKVSCKASGTDFHLWYIHWVRQAPGQGLEWMGRVFAGSGSYRYNEKFKGRVTITADTSTSTAYMELSSLRSEDTAVYYCAGSYYSYDVLDYWGQGTTVTVSS

SEQ ID NO: 168 - protein, 246 aa, synthetic construct
QVQLVQSGAEVKKPGSSVKVSCKASGTDFDKIYIHWVRQAPGQGLEWMGRISAGSGNTKYNEKFKGRVTITADTSTSTAYMELSSLRSEDTAVYYCAGSYYSYDVLDYWGQGTTVTVSSGGGGSGGGGSGGGGSGGGGSDIQMTQSPSFLSASVGDRVTITCKASQNVADRVAWYQQKPGKAPKALIYSSSHRYKGVPSRFSGSGSGTEFTLTISSLQPEDFATYFCQQFKSYPLTFGQGTKLEIK

SEQ ID NO: 169 - protein, 107 aa, synthetic construct; identical to SEQ ID NO: 141

SEQ ID NO: 170 - protein, 119 aa, synthetic construct; identical to SEQ ID NO: 115

SEQ ID NO: 171 - protein, 246 aa, synthetic construct
QVQLVQSGAEVKKPGSSVKVSCKASGTDFKLTYIHWVRQAPGQGLEWMGRISAGSGNTKYNEKFKGRVTITADTSTSTAYMELSSLRSEDTAVYYCAGSYYSYDVLDYWGQGTTVTVSSGGGGSGGGGSGGGGSGGGGSDIQMTQSPSFLSASVGDRVTITCKASQNVEDRVAWYQQKPGKAPKALIYSSSHRYKGVPSRFSGSGSGTEFTLTISSLQPEDFATYFCQQFKSYPLTFGQGTKLEIK

SEQ ID NO: 172 - protein, 107 aa, synthetic construct; identical to SEQ ID NO: 81

SEQ ID NO: 173 - protein, 119 aa, synthetic construct
QVQLVQSGAEVKKPGSSVKVSCKASGTDFKLTYIHWVRQAPGQGLEWMGRISAGSGNTKYNEKFKGRVTITADTSTSTAYMELSSLRSEDTAVYYCAGSYYSYDVLDYWGQGTTVTVSS

SEQ ID NO: 174 - protein, 246 aa, synthetic construct
QVQLVQSGAEVKKPGSSVKVSCKASGTDFRLTYIHWVRQAPGQGLEWMGRISPGSGNTKYNEKFKGRVTITADTSTSTAYMELSSLRSEDTAVYYCAGSYYSYDVLDYWGQGTTVTVSSGGGGSGGGGSGGGGSGGGGSDIQMTQSPSFLSASVGDRVTITCKASQNVGNRVAWYQQKPGKAPKALIYSSSHRYKGVPSRFSGSGSGTEFTLTISSLQPEDFATYFCQQFKSYPLTFGQGTKLEIK

SEQ ID NO: 175 - protein, 107 aa, synthetic construct; identical to SEQ ID NO: 108

SEQ ID NO: 176 - protein, 119 aa, synthetic construct
QVQLVQSGAEVKKPGSSVKVSCKASGTDFRLTYIHWVRQAPGQGLEWMGRISPGSGNTKYNEKFKGRVTITADTSTSTAYMELSSLRSEDTAVYYCAGSYYSYDVLDYWGQGTTVTVSS

SEQ ID NO: 177 - protein, 246 aa, synthetic construct
QVQLVQSGAEVKKPGSSVKVSCKASGHDFDKTYIHWVRQAPGQGLEWMGRVSAGSGNVKYNEKFKGRVTITADTSTSTAYMELSSLRSEDTAVYYCAGSYYSYDVLDYWGQGTTVTVSSGGGGSGGGGSGGGGSGGGGSDIQMTQSPSFLSASVGDRVTITCKASQNVEDRVAWYQQKPGKAPKALIYSSSHRYKGVPSRFSGSGSGTEFTLTISSLQPEDFATYFCQQFKSYPLTFGQGTKLEIK

SEQ ID NO: 178 - protein, 107 aa, synthetic construct; identical to SEQ ID NO: 81

SEQ ID NO: 179 - protein, 119 aa, synthetic construct
QVQLVQSGAEVKKPGSSVKVSCKASGHDFDKTYIHWVRQAPGQGLEWMGRVSAGSGNVKYNEKFKGRVTITADTSTSTAYMELSSLRSEDTAVYYCAGSYYSYDVLDYWGQGTTVTVSS

SEQ ID NO: 180 - protein, 246 aa, synthetic construct
QVQLVQSGAEVKKPGSSVKVSCKASGHDFKLTYIHWVRQAPGQGLEWMGRVSPGSGNTKYNEKFKGRVTITADTSTSTAYMELSSLRSEDTAVYYCAGSYYSYDVLDYWGQGTTVTVSSGGGGSGGGGSGGGGSGGGGSDIQMTQSPSFLSASVGDRVTITCKASQNVEDRVAWHQQKPGKAPKALIYSSSHRYKGVPSRFSGSGSGTEFTLTISSLQPEDFATYFCQQFKSYPLTFGQGTKLEIK

SEQ ID NO: 181 - protein, 107 aa, synthetic construct
DIQMTQSPSFLSASVGDRVTITCKASQNVEDRVAWHQQKPGKAPKALIYSSSHRYKGVPSRFSGSGSGTEFTLTISSLQPEDFATYFCQQFKSYPLTFGQGTKLEIK

SEQ ID NO: 182 - protein, 119 aa, synthetic construct
QVQLVQSGAEVKKPGSSVKVSCKASGHDFKLTYIHWVRQAPGQGLEWMGRVSPGSGNTKYNEKFKGRVTITADTSTSTAYMELSSLRSEDTAVYYCAGSYYSYDVLDYWGQGTTVTVSS

SEQ ID NO: 183 - protein, 246 aa, synthetic construct
QVQLVQSGAEVKKPGSSVKVSCKASGHDFDKTYIHWVRQAPGQGLEWMGRIYPGSGNVKYNEKFKGRVTITADTSTSTAYMELSSLRSEDTAVYYCAGSYYSYDVLDYWGQGTTVTVSSGGGGSGGGGSGGGGSGGGGSDIQMTQSPSFLSASVGDRVTITCKASQNVADRVAWYQQKPGKAPKALIYSSSHRYKGVPSRFSGSGSGTEFTLTISSLQPEDFATYFCQQFKSYPLTFGQGTKLEIK

SEQ ID NO: 184 - protein, 107 aa, synthetic construct; identical to SEQ ID NO: 141

SEQ ID NO: 185 - protein, 119 aa, synthetic construct
QVQLVQSGAEVKKPGSSVKVSCKASGHDFDKTYIHWVRQAPGQGLEWMGRIYPGSGNVKYNEKFKGRVTITADTSTSTAYMELSSLRSEDTAVYYCAGSYYSYDVLDYWGQGTTVTVSS

SEQ ID NO: 186 - protein, 246 aa, synthetic construct
QVQLVQSGAEVKKPGSSVKVSCKASGTDFDKTYIHWVRQAPGQGLEWMGRISAGSGNVKYNEKFKGRVTITADTSTSTAYMELSSLRSEDTAVYYCAGSYYSYDVLDYWGQGTTVTVSSGGGGSGGGGSGGGGSGGGGSDIQMTQSPSFLSASVGDRVTITCKASQNVDDRVAWYQQKPGKAPKALIYSSSHRYKGVPSRFSGSGSGTEFTLTISSLQPEDFATYFCQQFKSYPLTFGQGTKLEIK

SEQ ID NO: 187 - protein, 107 aa, synthetic construct; identical to SEQ ID NO: 87

SEQ ID NO: 188 - protein, 119 aa, synthetic construct
QVQLVQSGAEVKKPGSSVKVSCKASGTDFDKTYIHWVRQAPGQGLEWMGRISAGSGNVKYNEKFKGRVTITADTSTSTAYMELSSLRSEDTAVYYCAGSYYSYDVLDYWGQGTTVTVSS

SEQ ID NO: 189 - protein, 246 aa, synthetic construct
QVQLVQSGAEVKKPGSSVKVSCKASGTDFDKIYIHWVRQAPGQGLEWMGRISAGSGNIKYNEKFKGRVTITADTSTSTAYMELSSLRSEDTAVYYCAGSYYSYDVLDYWGQGTTVTVSSGGGGSGGGGSGGGGSGGGGSDIQMTQSPSFLSASVGDRVTITCKASQNVDDRVAWYQQKPGKAPKALIYSSSHRYKGVPSRFSGSGSGTEFTLTISSLQPEDFATYFCQQFKSYPLTFGQGTKLEIK

SEQ ID NO: 190 - protein, 107 aa, synthetic construct; identical to SEQ ID NO: 87

SEQ ID NO: 191 - protein, 119 aa, synthetic construct
QVQLVQSGAEVKKPGSSVKVSCKASGTDFDKIYIHWVRQAPGQGLEWMGRISAGSGNIKYNEKFKGRVTITADTSTSTAYMELSSLRSEDTAVYYCAGSYYSYDVLDYWGQGTTVTVSS

SEQ ID NO: 192 - protein, 246 aa, synthetic construct
QVQLVQSGAEVKKPGSSVKVSCKASGTDFDKIYIHWVRQAPGQGLEWMGRISAGSGNVKYNEKFKGRVTITADTSTSTAYMELSSLRSEDTAVYYCAGSYYSYDVLDYWGQGTTVTVSSGGGGSGGGGSGGGGSGGGGSDIQMTQSPSFLSASVGDRVTITCKASQNVGDRVAWYQQKPGKAPKALIYSSSHRYKGVPSRFSGSGSGTEFTLTISSLQPEDFATYFCQQFKSYPLTFGQGTKLEIK

SEQ ID NO: 193 - protein, 107 aa, synthetic construct; identical to SEQ ID NO: 102

SEQ ID NO: 194 - protein, 119 aa, synthetic construct; identical to SEQ ID NO: 85

SEQ ID NO: 195 - protein, 246 aa, synthetic construct
QVQLVQSGAEVKKPGSSVKVSCKASGGTFKLTYIHWVRQAPGQGLEWMGRVSAGSGNVKYNEKFKGRVTITADTSTSTAYMELSSLRSEDTAVYYCAGSYYSYDVLDYWGQGTTVTVSSGGGGSGGGGSGGGGSGGGGSDIQMTQSPSFLSASVGDRVTITCKASQNVDDRVAWYQQKPGKAPKALIYSSSHRYKGVPSRFSGSGSGTEFTLTISSLQPEDFATYFCQQFKSYPLTFGQGTKLEIK

SEQ ID NO: 196 - protein, 107 aa, synthetic construct; identical to SEQ ID NO: 87

SEQ ID NO: 197 - protein, 119 aa, synthetic construct
QVQLVQSGAEVKKPGSSVKVSCKASGGTFKLTYIHWVRQAPGQGLEWMGRVSAGSGNVKYNEKFKGRVTITADTSTSTAYMELSSLRSEDTAVYYCAGSYYSYDVLDYWGQGTTVTVSS

SEQ ID NO: 198 - protein, 246 aa, synthetic construct
QVQLVQSGAEVKKPGSSVKVSCKASGTDFKLTYIHWVRQAPGQGLEWMGRISPGSGNVKYNEKFKGRVTITADTSTSTAYMELSSLRSEDTAVYYCAGSYYSYDVLDYWGQGTTVTVSSGGGGSGGGGSGGGGSGGGGSDIQMTQSPSFLSASVGDRVTITCKASQNVDNRVAWHQQKPGKAPKALIYSSSHRYKGVPSRFSGSGSGTEFTLTISSLQPEDFATYFCQQFKSYPLTFGQGTKLEIK

SEQ ID NO: 199 - protein, 107 aa, synthetic construct
DIQMTQSPSFLSASVGDRVTITCKASQNVDNRVAWHQQKPGKAPKALIYSSSHRYKGVPSRFSGSGSGTEFTLTISSLQPEDFATYFCQQFKSYPLTFGQGTKLEIK

SEQ ID NO: 200 - protein, 119 aa, synthetic construct
QVQLVQSGAEVKKPGSSVKVSCKASGTDFKLTYIHWVRQAPGQGLEWMGRISPGSGNVKYNEKFKGRVTITADTSTSTAYMELSSLRSEDTAVYYCAGSYYSYDVLDYWGQGTTVTVSS

SEQ ID NO: 201 - protein, 246 aa, synthetic construct
QVQLVQSGAEVKKPGSSVKVSCKASGHDFDKFYIHWVRQAPGQGLEWMGRVSAGSGNTKYNEKFKGRVTITADTSTSTAYMELSSLRSEDTAVYYCAGSYYSYDVLDYWGQGTTVTVSSGGGGSGGGGSGGGGSGGGGSDIQMTQSPSFLSASVGDRVTITCKASQNVDNRVAWYQQKPGKAPKALIYSSSHRYKGVPSRFSGSGSGTEFTLTISSLQPEDFATYFCQQFKSYPLTFGQGTKLEIK

SEQ ID NO: 202 - protein, 107 aa, synthetic construct; identical to SEQ ID NO: 90

SEQ ID NO: 203 - protein, 119 aa, synthetic construct
QVQLVQSGAEVKKPGSSVKVSCKASGHDFDKFYIHWVRQAPGQGLEWMGRVSAGSGNTKYNEKFKGRVTITADTSTSTAYMELSSLRSEDTAVYYCAGSYYSYDVLDYWGQGTTVTVSS

SEQ ID NO: 204 - protein, 246 aa, synthetic construct
QVQLVQSGAEVKKPGSSVKVSCKASGTDFDKFYIHWVRQAPGQGLEWMGRVSAGSGNVKYNEKFKGRVTITADTSTSTAYMELSSLRSEDTAVYYCAGSYYSYDVLDYWGQGTTVTVSSGGGGSGGGGSGGGGSGGGGSDIQMTQSPSFLSASVGDRVTITCKASQNVGDRVVWYQQKPGKAPKALIYSSSHRYKGVPSRFSGSGSGTEFTLTISSLQPEDFATYFCQQFKSYPLTFGQGTKLEIK

SEQ ID NO: 205 - protein, 119 aa, synthetic construct
QVQLVQSGAEVKKPGSSVKVSCKASGTDFDKFYIHWVRQAPGQGLEWMGRVSAGSGNVKYNEKFKGRVTITADTSTSTAYMELSSLRSEDTAVYYCAGSYYSYDVLDYWGQGTTVTVSS

SEQ ID NO: 206 - protein, 246 aa, synthetic construct
QVQLVQSGAEVKKPGSSVKVSCKASGYSFTTYYIHWVRQAPGQGLEWMGWFSAGSGNTKYNEKFKGRVTITADTSTSTAYMELSSLRSEDTAVYYCAVSYYSYDVLDYWGQGTTVTVSSGGGGSGGGGSGGGGSGGGGSDIQMTQSPSFLSASVGDRVTITCKASQNVGINVVWHQQKPGKAPKALIYSSSHRYSGVPSRFSGSGSGTEFTLTISSLQPEDFATYFCQQFKSYPLTFGQGTKLEIK

SEQ ID NO: 207 - protein, 119 aa, synthetic construct
QVQLVQSGAEVKKPGSSVKVSCKASGYSFTTYYIHWVRQAPGQGLEWMGWFSAGSGNTKYNEKFKGRVTITADTSTSTAYMELSSLRSEDTAVYYCAVSYYSYDVLDYWGQGTTVTVSS

SEQ ID NO: 208 - protein, 246 aa, synthetic construct
QVQLVQSGAEVKKPGSSVKVSCKASGYSFTTYYIHWVRQAPGQGLEWMGWFSAGSGNTKYNEKFKGRVTITADTSTSTAYMELSSLRSEDTAVYYCAGSYYSYDVLDYWGQGTTVTVSSGGGGSGGGGSGGGGSGGGGSDIQMTQSPSFLSASVGDRVTITCKASQNVGINVVWHQQKPGKAPKALIYSSSHRYSGVPSRFSGSGSGTEFTLTISSLQPEDFATYFCQQFKSYPLTFGQGTKLEIK

SEQ ID NO: 209 - protein, 119 aa, synthetic construct
QVQLVQSGAEVKKPGSSVKVSCKASGYSFTTYYIHWVRQAPGQGLEWMGWFSAGSGNTKYNEKFKGRVTITADTSTSTAYMELSSLRSEDTAVYYCAGSYYSYDVLDYWGQGTTVTVSS

SEQ ID NO: 210 - protein, 246 aa, synthetic construct
QVQLVQSGAEVKKPGSSVKVSCKASGYSFTTYYIHWVRQAPGQGLEWMGWFFPGSGNTKYNEKFKGRVTITADTSTSTAYMELSSLRSEDTAVYYCAGSYYSYDVLDYWGQGTTVTVSSGGGGSGGGGSGGGGSGGGGSDIQMTQSPSFLSASVGDRVTITCKASQNVGINVVWHQQKPGKAPKALIYSSSHRYSGVPSRFSGSGSGTEFTLTISSLQPEDFATYFCQQFKSYPLTFGQGTKLEIK

SEQ ID NO: 211 - protein, 119 aa, synthetic construct
QVQLVQSGAEVKKPGSSVKVSCKASGYSFTTYYIHWVRQAPGQGLEWMGWFFPGSGNTKYNEKFKGRVTITADTSTSTAYMELSSLRSEDTAVYYCAGSYYSYDVLDYWGQGTTVTVSS

SEQ ID NO: 212 - protein, 246 aa, synthetic construct
QVQLVQSGAEVKKPGSSVKVSCKASGYSFTTYYIHWVRQAPGQGLEWMGWFSPGSGNTKYNEKFKGRVTITADTSTSTAYMELSSLRSEDTAVYYCAVSYYSYDVLDYWGQGTTVTVSSGGGGSGGGGSGGGGSGGGGSDIQMTQSPSFLSASVGDRVTITCKASQNVGINVVWHQQKPGKAPKALIYSSSHRYSGVPSRFSGSGSGTEFTLTISSLQPEDFATYFCQQFKSYPLTFGQGTKLEIK

SEQ ID NO: 213 - protein, 119 aa, synthetic construct
QVQLVQSGAEVKKPGSSVKVSCKASGYSFTTYYIHWVRQAPGQGLEWMGWFSPGSGNTKYNEKFKGRVTITADTSTSTAYMELSSLRSEDTAVYYCAVSYYSYDVLDYWGQGTTVTVSS

SEQ ID NO: 214 - protein, 246 aa, synthetic construct
QVQLVQSGAEVKKPGSSVKVSCKASGYSFTTYYIHWVRQAPGQGLEWMGWFSPGSGNTKYNEKFKGRVTITADTSTSTAYMELSSLRSEDTAVYYCAGSYYSYDVLDYWGQGTTVTVSSGGGGSGGGGSGGGGSGGGGSDIQMTQSPSFLSASVGDRVTITCKASQNVGINVVWHQQKPGKAPKALIYSSSHRYSGVPSRFSGSGSGTEFTLTISSLQPEDFATYFCQQFKSYPLTFGQGTKLEIK

SEQ ID NO: 215 - protein, 119 aa, synthetic construct
QVQLVQSGAEVKKPGSSVKVSCKASGYSFTTYYIHWVRQAPGQGLEWMGWFSPGSGNTKYNEKFKGRVTITADTSTSTAYMELSSLRSEDTAVYYCAGSYYSYDVLDYWGQGTTVTVSS

SEQ ID NO: 216 - protein, 246 aa, synthetic construct
QVQLVQSGAEVKKPGSSVKVSCKASGYSFTTYYIHWVRQAPGQGLEWMGRIFPGSGNIKYNEKFKGRVTITADTSTSTAYMELSSLRSEDTAVYYCAGSYYSYDVLDYWGQGTTVTVSSGGGGSGGGGSGGGGSGGGGSDIQMTQSPSFLSASVGDRVTITCKASQNVGINVVWHQQKPGKAPKALIYSSSHRYSGVPSRFSGSGSGTEFTLTISSLQPEDFATYFCQQFKSYPLTFGQGTKLEIK

SEQ ID NO: 217 - protein, 119 aa, synthetic construct
QVQLVQSGAEVKKPGSSVKVSCKASGYSFTTYYIHWVRQAPGQGLEWMGRIFPGSGNIKYNEKFKGRVTITADTSTSTAYMELSSLRSEDTAVYYCAGSYYSYDVLDYWGQGTTVTVSS

SEQ ID NO: 218 - protein, 246 aa, synthetic construct
QVQLVQSGAEVKKPGSSVKVSCKASGYSFTTYYIHWVRQAPGQGLEWMGWFFPGSGNIKYNEKFKGRVTITADTSTSTAYMELSSLRSEDTAVYYCAGSIYSAGVLDYWGQGTTVTVSSGGGGSGGGGSGGGGSGGGGSDIQMTQSPSFLSASVGDRVTITCKASQNVGINVVWHQQKPGKAPKALIYSSSHRYSGVPSRFSGSGSGTEFTLTISSLQPEDFATYFCQQFKSYPLTFGQGTKLEIK

SEQ ID NO: 219 - protein, 119 aa, synthetic construct
QVQLVQSGAEVKKPGSSVKVSCKASGYSFTTYYIHWVRQAPGQGLEWMGWFFPGSGNIKYNEKFKGRVTITADTSTSTAYMELSSLRSEDTAVYYCAGSIYSAGVLDYWGQGTTVTVSS

SEQ ID NO: 220 - protein, 246 aa, synthetic construct
QVQLVQSGAEVKKPGSSVKVSCKASGYSFTLGYIHWVRQAPGQGLEWMGWFFPGSGNIKYNEKFKGRVTITADTSTSTAYMELSSLRSEDTAVYYCAGSYYSYDVLDYWGQGTTVTVSSGGGGSGGGGSGGGGSGGGGSDIQMTQSPSFLSASVGDRVTITCKASQNVGINVVWHQQKPGKAPKALIYSSSHRYSGVPSRFSGSGSGTEFTLTISSLQPEDFATYFCQQFKSYPLTFGQGTKLEIK

SEQ ID NO: 221 - protein, 119 aa, synthetic construct
QVQLVQSGAEVKKPGSSVKVSCKASGYSFTLGYIHWVRQAPGQGLEWMGWFFPGSGNIKYNEKFKGRVTITADTSTSTAYMELSSLRSEDTAVYYCAGSYYSYDVLDYWGQGTTVTVSS

SEQ ID NO: 222 - protein, 246 aa, synthetic construct
QVQLVQSGAEVKKPGSSVKVSCKASGYSFRLTYIHWVRQAPGQGLEWMGWFFPGSGNIKYNEKFKGRVTITADTSTSTAYMELSSLRSEDTAVYYCAGSYYSYDVLDYWGQGTTVTVSSGGGGSGGGGSGGGGSGGGGSDIQMTQSPSFLSASVGDRVTITCKASQNVGINVVWHQQKPGKAPKALIYSSSHRYSGVPSRFSGSGSGTEFTLTISSLQPEDFATYFCQQFKSYPLTFGQGTKLEIK

SEQ ID NO: 223 - protein, 119 aa, synthetic construct
QVQLVQSGAEVKKPGSSVKVSCKASGYSFRLTYIHWVRQAPGQGLEWMGWFFPGSGNIKYNEKFKGRVTITADTSTSTAYMELSSLRSEDTAVYYCAGSYYSYDVLDYWGQGTTVTVSS

SEQ ID NO: 224 - protein, 246 aa, synthetic construct
QVQLVQSGAEVKKPGSSVKVSCKASGYSFHNWYIHWVRQAPGQGLEWMGWFFPGSGNIKYNEKFKGRVTITADTSTSTAYMELSSLRSEDTAVYYCAGSYYSYDVLDYWGQGTTVTVSSGGGGSGGGGSGGGGSGGGGSDIQMTQSPSFLSASVGDRVTITCKASQNVGINVVWHQQKPGKAPKALIYSSSHRYSGVPSRFSGSGSGTEFTLTISSLQPEDFATYFCQQFKSYPLTFGQGTKLEIK

SEQ ID NO: 225 - protein, 119 aa, synthetic construct
QVQLVQSGAEVKKPGSSVKVSCKASGYSFHNWYIHWVRQAPGQGLEWMGWFFPGSGNIKYNEKFKGRVTITADTSTSTAYMELSSLRSEDTAVYYCAGSYYSYDVLDYWGQGTTVTVSS

SEQ ID NO: 226 - protein, 32 aa, synthetic construct
RFTISRDNAKNSLYLQMNSLRAEDTAVYYCAR

SEQ ID NO: 227 - protein, 14 aa, synthetic construct
HSAYYVNYENAMDY

SEQ ID NO: 228 - protein, 11 aa, synthetic construct
WGQGTLVTVSS

SEQ ID NO: 229 - protein, 28 aa, synthetic construct
QVQLVESGGGVVQPGRSLRLSCAASGFA

SEQ ID NO: 230 - protein, 107 aa, synthetic construct
  VARIANT 30: note = G, E, A, or D
  VARIANT 31: note = N or D
  VARIANT 32: note = R or K
  VARIANT 36: note = Y or H
  VARIANT 56: note = K or S
DIQMTQSPSFLSASVGDRVTITCKASQNVXXXVAWXQQKPGKAPKALIYSSSHRYXGVPSRFSGSGSGTEFTLTISSLQPEDFATYFCQQFKSYPLTFGQGTKLEIK

SEQ ID NO: 231 - protein, 119 aa, synthetic construct
  VARIANT 27: note = H, T, G, or Y
  VARIANT 28: note = D, T, or S
  VARIANT 30: note = H, R, D, K, or T
  VARIANT 31: note = L, D, K, T, or N
  VARIANT 32: note = W, F, T, I, Y, or G
  VARIANT 50: note = R or W
  VARIANT 51: note = V, I, or F
  VARIANT 52: note = F, S, or Y
  VARIANT 53: note = A or P
  VARIANT 57: note = N or S
  VARIANT 58: note = T, V, Y, or I
  VARIANT 59: note = K or R
  VARIANT 98: note = G or V
  VARIANT 100: note = Y or I
  VARIANT 103: note = Y or A
  VARIANT 104: note = D or G
QVQLVQSGAEVKKPGSSVKVSCKASGXXFXXXYIHWVRQAPGQGLEWMGXXXXGSGXXXYNEKFKGRVTITADTSTSTAYMELSSLRSEDTAVYYCAXSXYSXXVLDYWGQGTTVTVSS

SEQ ID NO: 232 - protein, 107 aa, synthetic construct
DIQMTQTTSSLSASLGDRVTISCSASQGISNYLNWYQQKPDGTVKLLIYYTSSLHSGVPSRFSGSGSGTDYSLTISNLEPEDIATYYCQQYSKLPRTFGGGTKVEIK

SEQ ID NO: 233 - protein, 10 aa, synthetic construct
FGGGTKVEIK

SEQ ID NO: 234 - protein, 113 aa, synthetic construct
QVQLVQSGAEVKKPGASVKVSCKASGYSFTGYYIHWVRQAPGQGLEWIGYISAYNGASSYNQKFKGRATFTVDTSTSTAYMELRSLRSDDTAVYYCASSMDYWGQGTLVTVSS

SEQ ID NO: 235 - protein, 113 aa, synthetic construct
QVQLVQSGAEVKKPGASVKVSCKASGYSFTGYYIHWVRQAPGKGLEWIGYISAYNGASSYNQKFKGRATFTVDTSTSTAYMELSSLRSEDTAVYYCASSMDYWGQGTLVTVSS

SEQ ID NO: 236 - protein, 113 aa, synthetic construct
QVQLVQSGAEVKKPGASVKVSCKASGYSFTGYYIHWVRQAPGQGLEWIGYISAYNGASSYNQKFKGRATFTVDTSISTAYMELSRLRSDDTAVYYCASSMDYWGQGTLVTVSS

SEQ ID NO: 237 - protein, 113 aa, synthetic construct
QVQLVQSGAEVKKPGASVKVSCKASGYSFTGYYIHWVRQAPGQGLEWIGYISAYNGASSYNQKFKGRATFTVDTSTSTAYMELSSLRSEDTAVYYCASSMDYWGQGTLVTVSS

SEQ ID NO: 238 - protein, 112 aa, synthetic construct
DVVMTQSPLSLPVTLGQPASISCKSSQSLLDSDGKTYLNWLQQRPGQSPKRLIYLVSKLDSGVPDRFSGSGSGTDFTLKISRVEAEDVGVYHCWQGTHFPYTFGQGTKLEIK

SEQ ID NO: 239 - protein, 112 aa, synthetic construct
DVVMTQTPLSLSVTPGQPASISCKSSQSLLDSDGKTYLNWLLQKPGQSPKLLIYLVSKLDSGVPDRFSGSGSGTDFTLKISRVEAEDVGVYHCWQGTHFPYTFGQGTKLEIK

SEQ ID NO: 240 - protein, 112 aa, synthetic construct
DVVMTQTPLSLSVTPGQPASISCKSSQSLLDSDGKTYLNWLLQKPGQPPKLLIYLVSKLDSGVPDRFSGSGSGTDFTLKISRVEAEDVGVYHCWQGTHFPYTFGQGTKLEIK

SEQ ID NO: 241 - protein, 112 aa, synthetic construct
DVVMTQTPLSSPVTLGQPASISCKSSQSLLDSDGKTYLNWLQQRPGQPPKLLIYLVSKLDSGVPDRFSGSGAGTDFTLKISRVEAEDVGVYHCWQGTHFPYTFGQGTKLEIK

SEQ ID NO: 242 - protein, 112 aa, synthetic construct
DVVMTQSPLSLPVTPGEPASISCKSSQSLLDSDGKTYLNWLLQKPGQSPKLLIYLVSKLDSGVPDRFSGSGSGTDFTLKISRVEAEDVGVYHCWQGTHFPYTFGQGTKLEIK

SEQ ID NO: 243 - protein, 17 aa, synthetic construct
YISAYNGASSYNQKFKG

SEQ ID NO: 244 - protein, 113 aa, synthetic construct
  VARIANT 43: note = Q or K
  VARIANT 76: note = I or T
  VARIANT 84: note = S or R
  VARIANT 85: note = R or S
  VARIANT 91: note = T or M
QVQLVQSGAEVKKPGASVKVSCKASGYSFTGYYIHWVRQAPGXGLEWIGYISAYNGASSYNQKFKGRATFTVDTSXSTAYMELXXLRSDDXAVYYCASSMDYWGQGTLVTVSS

SEQ ID NO: 245 - protein, 112 aa, synthetic construct
  VARIANT 7: note = S or T
  VARIANT 11: note = L or S
  VARIANT 12: note = P or S
  VARIANT 15: note = L or P
  VARIANT 17: note = Q or E
  VARIANT 42: note = Q or L
  VARIANT 44: note = R or K
  VARIANT 48: note = S or P
  VARIANT 51: note = R or L
  VARIANT 72: note = S or A
DVVMTQXPLSXXVTXGXPASISCKSSQSLLDSDGKTYLNWLXQXPGQXPKXLIYLVSKLDSGVPDRFSGSGXGTDFTLKISRVEAEDVGVYHCWQGTHFPYTFGQGTKLEIK

SEQ ID NO: 246 - protein, 7 aa, synthetic construct
LASNLES

SEQ ID NO: 247 - protein, 32 aa, synthetic construct
GVPARFSGSGSRTDFTLTIDPVEADDAATYYC

SEQ ID NO: 248 - protein, 9 aa, synthetic construct
QQNNEDPLT

SEQ ID NO: 249 - protein, 10 aa, synthetic construct
FGAGTKLELK

SEQ ID NO: 250 - protein, 23 aa, synthetic construct
DIVLTQTPLSLSVTPGQPASISC

SEQ ID NO: 251 - protein, 15 aa, synthetic construct
RASESVDSFGISFMH

SEQ ID NO: 252 - protein, 15 aa, synthetic construct
WYLQKPGQSPQLLIY

SEQ ID NO: 253 - protein, 7 aa, synthetic construct
LASNLES

SEQ ID NO: 254 - protein, 32 aa, synthetic construct
GVPDRFSGSGSRTDFTLKISRVEAEDVGVYYC

SEQ ID NO: 255 - protein, 9 aa, synthetic construct
QQNNEDPLT

SEQ ID NO: 256 - protein, 10 aa, synthetic construct
FGQGTKLEIK

SEQ ID NO: 257 - protein, 23 aa, synthetic construct
DIVLTQSPLSLPVTLGQPASISC

SEQ ID NO: 258 - protein, 15 aa, synthetic construct
RASESVDSFGISFMH

SEQ ID NO: 259 - protein, 15 aa, synthetic construct
WYQQRPGQSPRLLIY

SEQ ID NO: 260 - protein, 7 aa, synthetic construct
LASNLES

SEQ ID NO: 261 - protein, 32 aa, synthetic construct; identical to SEQ ID NO: 254

SEQ ID NO: 262 - protein, 9 aa, synthetic construct
QQNNEDPLT

SEQ ID NO: 263 - protein, 10 aa, synthetic construct
FGQGTKLEIK

SEQ ID NO: 264 - protein, 23 aa, synthetic construct
DIVLTQTPLSLPVTPGEPASISC

SEQ ID NO: 265 - protein, 15 aa, synthetic construct
RASESVDSFGISFMH

SEQ ID NO: 266 - protein, 15 aa, synthetic construct
WYLQKPGQSPQLLIY

SEQ ID NO: 267 - protein, 7 aa, synthetic construct
LASNLES

SEQ ID NO: 268 - protein, 32 aa, synthetic construct; identical to SEQ ID NO: 254

SEQ ID NO: 269 - protein, 9 aa, synthetic construct
QQNNEDPLT

SEQ ID NO: 270 - protein, 10 aa, synthetic construct
FGQGTKLEIK

SEQ ID NO: 271 - protein, 23 aa, synthetic construct
EIVLTQSPATLSLSPGERATLSC

SEQ ID NO: 272 - protein, 15 aa, synthetic construct
RASESVDSFGISFMH

SEQ ID NO: 273 - protein, 15 aa, synthetic construct
WYQQKPGQAPRLLIY

SEQ ID NO: 274 - protein, 7 aa, synthetic construct
LASNLES

SEQ ID NO: 275 - protein, 32 aa, synthetic construct
GIPARFSGSGSRTDFTLTISSLEPEDFAVYYC

SEQ ID NO: 276 - protein, 9 aa, synthetic construct
QQNNEDPLT

SEQ ID NO: 277 - protein, 10 aa, synthetic construct
FGQGTKLEIK

SEQ ID NO: 278 - protein, 23 aa, synthetic construct
DIQLTQSPSSLSASVGDRVTITC

SEQ ID NO: 279 - protein, 15 aa, synthetic construct
RASESVDSFGISFMH

SEQ ID NO: 280 - protein, 15 aa, synthetic construct
WYQQKPGKAPKLLIY

SEQ ID NO: 281 - protein, 7 aa, synthetic construct
LASNLES

SEQ ID NO: 282 - protein, 32 aa, synthetic construct
GVPSRFSGSGSRTDFTFTISSLQPEDIATYYC

SEQ ID NO: 283 - protein, 9 aa, synthetic construct
QQNNEDPLT

SEQ ID NO: 284 - protein, 10 aa, synthetic construct
FGQGTKLEIK

SEQ ID NO: 285-1000 - skipped (716 entries)

SEQ ID NO: 1001 - protein, 426 aa, synthetic construct
MLLSVPLLLGLLGLAVAHHHHHHHHGGGGSEPAVYFKEQFLDGDGWTSRWIESKHKSDFGKFVLSSGKFYGDEEKDKGLQTSQDARFYALSASFEPFSNKGQTLVVQFTVKHEQNIDCGGGYVKLFPNSLDQTDMHGDSEYNIMFGPDICGPGTKKVHVIFNYKGKNVLINKDIRCKDDEFTHLYTLIVRPDNTYEVKIDNSQVESGSLEDDWDFLPPKKIKDPDASKPEDWDERAKIDDPTDSKPEDWDKPEHIPDPDAKKPEDWDEEMDGEWEPPVIQNPEYKGEWKPRQIDNPDYKGTWIHPEIDNPEYSPDPSIYAYDNFGVLGLDLWQVKSGTIFDNFLITNDEAYAEEFGNETWGVTKAAEKQMKDKQDEEQRLKEEEEDKKRKEEEEAEDKEDDEDKDEDEEDEEDKEEDEEEDVPGQA

SEQ ID NO: 1002 - protein, 443 aa, synthetic construct
MLLSVPLLLGLLGLAVAHHHHHHHHGGGGSEPAVYFKEQFLDGDGWTSRWIESKHKSDFGKFVLSSGKFYGDEEKDKGLQTSQDARFYALSASFEPFSNKGQTLVVQFTVKHEQNIDCGGGYVKLFPNSLDQTDMHGDSEYNIMFGPDICGPGTKKVHVIFNYKGKNVLINKDIRCKDDEFTHLYTLIVRPDNTYEVKIDNSQVESGSLEDDWDFLPPKKIKDPDASKPEDWDERAKIDDPTDSKPEDWDKPEHIPDPDAKKPEDWDEEMDGEWEPPVIQNPEYKGEWKPRQIDNPDYKGTWIHPEIDNPEYSPDPSIYAYDNFGVLGLDLWQVKSGTIFDNFLITNDEAYAEEFGNETWGVTKAAEKQMKDKQDEEQRLKEEEEDKKRKEEEEAEDNCRRMMRTKMRMRRMRRTRRKMRRKMSPARPRTSCREACLQGWTEA

SEQ ID NO: 1003 - protein, 424 aa, synthetic construct
MLLSVPLLLGLLGLAVAHHHHHHHHGGGGSEPAVYFKEQFLDGDGWTSRWIESKHKSDFGKFVLSSGKFYGDEEKDKGLQTSQDARFYALSASFEPFSNKGQTLVVQFTVKHEQNIDCGGGYVKLFPNSLDQTDMHGDSEYNIMFGPDICGPGTKKVHVIFNYKGKNVLINKDIRCKDDEFTHLYTLIVRPDNTYEVKIDNSQVESGSLEDDWDFLPPKKIKDPDASKPEDWDERAKIDDPTDSKPEDWDKPEHIPDPDAKKPEDWDEEMDGEWEPPVIQNPEYKGEWKPRQIDNPDYKGTWIHPEIDNPEYSPDPSIYAYDNFGVLGLDLWQVKSGTIFDNFLITNDEAYAEEFGNETWGVTKAAEKQMKDKQDEEQRTRRMMRTKMRMRRMRRTRRKMRRKMSPARPRTSCREACLQGWTEA

SEQ ID NO: 1004-1043 - skipped (40 entries)

SEQ ID NO: 1044 - protein, 114 aa, Homo sapiens
MSIGLLCCAALSLLWAGPVNAGVTQTPKFQVLKTGQSMTLQCAQDMNHEYMSWYRQDPGMGLRLIHYSVGAGITDQGEVPNGYNVSRSTTEDFPLRLLSAAPSQTSVYFCASSY

SEQ ID NO: 1045-1099 - skipped (55 entries)

SEQ ID NO: 1100 - protein, 119 aa, synthetic construct; identical to SEQ ID NO: 9

SEQ ID NO: 1101 - protein, 106 aa, synthetic construct
QSVLTQPPSVSEAPRQRVTISCKASQNVGINVVWHQQLPGKAPKALIYSSSHRYSGVSDRFSGSGSGTSFSLAISGLQSEDEADYFCQQFKSYPLTFGTGTKVTVL

SEQ ID NO: 1102 - protein, 5 aa, synthetic construct
SAYMH

SEQ ID NO: 1103 - protein, 17 aa, synthetic construct
RIDPATGKTKYAPKFQA

SEQ ID NO: 1104 - protein, 10 aa, synthetic construct
SLNWDYGLDY

SEQ ID NO: 1105 - protein, 7 aa, synthetic construct
GFNIKSA

SEQ ID NO: 1106 - protein, 6 aa, synthetic construct
DPATGK

SEQ ID NO: 1107 - protein, 10 aa, synthetic construct
GFNIKSAYMH

SEQ ID NO: 1108 - protein, 7 aa, synthetic construct
AASNLES

SEQ ID NO: 1109 - protein, 9 aa, synthetic construct
QQSIEDPWT

SEQ ID NO: 1110 - protein, 11 aa, synthetic construct
SKSVSILGTHL

SEQ ID NO: 1111 - protein, 111 aa, synthetic construct
DIVLTQSPASLAVSLGQRATISCRASKSVSILGTHLIHWYQQKPGQPPKLLIYAASNLESGVPARFSGSGSETVFTLNIHPVEEEDAATYFCQQSIEDPWTFGGGTKLGIK

SEQ ID NO: 1112 - protein, 119 aa, synthetic construct
EVQLQQSVADLVRPGASLKLSCTASGFNIKSAYMHWVIQRPDQGPECLGRIDPATGKTKYAPKFQAKATITADTSSNTAYLQLSSLTSEDTAIYYCTRSLNWDYGLDYWGQGTSVTVSS

SEQ ID NO: 1113 - protein, 119 aa, synthetic construct
QVQLVQSGAEVKKPGASVKVSCKASGFNIKSAYMHWVRQAPGQGLEWMGRIDPATGKTKYAPKFQARVTMTADTSTNTAYMELSSLRSEDTAVYYCARSLNWDYGLDYWGQGTLVTVSS

SEQ ID NO: 1114 - protein, 119 aa, synthetic construct
QVQLVQSGAEVKKPGASVKVSCKASGFNIKSAYMHWVRQAPGQEPGCMGRIDPATGKTKYAPKFQARVTMTADTSINTAYTELSSLRSEDTATYYCARSLNWDYGLDYWGQGTLVTVSS

SEQ ID NO: 1115 - protein, 119 aa, synthetic construct
QVQLVQSGAEVKKPGSSVKVSCKASGFNIKSAYMHWVRQAPGQGLEWMGRIDPATGKTKYAPKFQARVTITADTSTNTAYMELSSLRSEDTAVYYCARSLNWDYGLDYWGQGTLVTVSS

SEQ ID NO: 1116 - protein, 119 aa, synthetic construct
QVQLVQSGAEVKKPGASVKVSCKASGFNIKSAYMHWVRQAPGQRLEWMGRIDPATGKTKYAPKFQARVTITADTSANTAYMELSSLRSEDTAVYYCARSLNWDYGLDYWGQGTLVTVSS

SEQ ID NO: 1117 - protein, 109 aa, synthetic construct
EIVLTQSPATLSLSPGERATLSCRASKSVSILGTHLIHWYQQKPGQAPRLLIYAASNLESGIPARFSGSGSETDFTLTISSLEPEDFAVYFCQQSIEDPFGGGTKVEIK

SEQ ID NO: 1118 - protein, 109 aa, synthetic construct
EIVLTQSPATLSLSPGERATLSCRASKSVSILGTHLIHWYQQKPGLAPRLLIYAASNLESGIPDRFSGSGSETDFTLTISRLEPEDFAVYFCQQSIEDPFGGGTKVEIK

SEQ ID NO: 1119 - protein, 109 aa, synthetic construct
EIVLTQSPGTLSLSPGERATLSCRASKSVSILGTHLIHWYQQKPGQAPRLLIYAASNLESGIPDRFSGSGSETDFTLTISRLEPEDFAVYFCQQSIEDPFGGGTKVEIK

SEQ ID NO: 1120 - protein, 5 aa, synthetic construct
DTYMY

SEQ ID NO: 1121 - protein, 17 aa, synthetic construct
RIDPANGNTKYDPKFQD

SEQ ID NO: 1122 - protein, 9 aa, synthetic construct
GSYYYAMDY

SEQ ID NO: 1123 - protein, 7 aa, synthetic construct
GFKTEDT

SEQ ID NO: 1124 - protein, 6 aa, synthetic construct
DPANGN

SEQ ID NO: 1125 - protein, 10 aa, synthetic construct
GFKTEDTYMY

SEQ ID NO: 1126 - protein, 15 aa, synthetic construct
RASESVDSYGNSFMH

SEQ ID NO: 1127 - protein, 7 aa, synthetic construct
RASNLES

SEQ ID NO: 1128 - protein, 9 aa, synthetic construct
QQSNEDPYT

SEQ ID NO: 1129 - protein, 11 aa, synthetic construct
SESVDSYGNSF

SEQ ID NO: 1130 - protein, 118 aa, synthetic construct
EVQLQQSGAELVKPGASVKLSCTASGFKTEDTYMYWVKQRPEQGLEWIGRIDPANGNTKYDPKFQDKATITADSSSNTAYLQLSSLPSEDTAVYYCARGSYYYAMDYWGQGTSVTVSS

SEQ ID NO: 1131 - protein, 118 aa, synthetic construct
QVQLVQSGAEVKKPGSSVKVSCKASGFKTEDTYMYWVRQAPGQGLEWIGRIDPANGNTKYDPKFQDRATITADSSTNTAYMELSSLRSEDTAVYYCARGSYYYAMDYWGQGTLVTVSS

SEQ ID NO: 1132 - protein, 118 aa, synthetic construct
QVQLVQSGAEVKKPGASVKVSCKASGFKTEDTYMYWVRQAPGQRLEWIGRIDPANGNTKYDPKFQDRATITADSSANTAYMELSSLRSEDTAVYYCARGSYYYAMDYWGQGTLVTVSS

SEQ ID NO: 1133 - protein, 118 aa, synthetic construct
EVQLVESGGGLVQPGGSLKLSCAASGFKTEDTYMYWVRQASGKGLEWIGRIDPANGNTKYDPKFQDRATISADSSKNTAYLQMNSLKTEDTAVYYCARGSYYYAMDYWGQGTLVTVSS

SEQ ID NO: 1134 - protein, 118 aa, synthetic construct
EVQLVQSGAEVKKPGESLRISCKASGFKTEDTYMYWVRQMPGKGLEWIGRIDPANGNTKYDPKFQDQATISADSSINTAYLQWSSLKASDTAMYYCARGSYYYAMDYWGQGTLVTVSS

SEQ ID NO: 1135 - protein, 118 aa, synthetic construct
QVQLVQSGSELKKPGASVKVSCKASGFKTEDTYMYWVRQAPGQGLEWIGRIDPANGNTKYDPKFQDRAVISADSSVNTAYLQISSLKAEDTAVYYCARGSYYYAMDYWGQGTLVTVSS

SEQ ID NO: 1136 - protein, 111 aa, synthetic construct
DIVLTQSPDSLAVSLGERATINCRASESVDSYGNSFMHWYQQKPGQPPKLLIYRASNLESGVPDRFSGSGSRTDFTLTISSLQAEDVAVYYCQQSNEDPYTFGQGTKLEIK

SEQ ID NO: 1137 - protein, 111 aa, synthetic construct
EIVLTQSPATLSLSPGERATLSCRASESVDSYGNSFMHWYQQKPGQAPKLLIYRASNLESGIPARFSGSGSRTDFTLTISRLEPEDFAVYYCQQSNEDPYTFGQGTKLEIK

SEQ ID NO: 1138 - protein, 111 aa, synthetic construct
DIQLTQSPSSLSASVGDRVTITCRASESVDSYGNSFMHWYQQKPGQAPKLLIYRASNLESGVPSRFSGSGSRTDFTLTISSLQPEDVATYYCQQSNEDPYTFGQGTKLEIK

SEQ ID NO: 1139 - protein, 111 aa, synthetic construct
AIQLTQSPSSLSASVGDRVTITCRASESVDSYGNSFMHWYQQKPGKAPKLLIYRASNLESGVPSRFSGSGSRTDFTLTISSLQPEDFATYYCQQSNEDPYTFGQGTKLEIK

SEQ ID NO: 1140 - protein, 111 aa, synthetic construct
EIVLTQSPDFQSVTPKEKVTITCRASESVDSYGNSFMHWYQQKPDQSPKLLIYRASNLESGVPSRFSGSGSRTDFTLTINSLEAEDAATYYCQQSNEDPYTFGQGTKLEIK

SEQ ID NO: 1141 - protein, 5 aa, synthetic construct
SYAMS

SEQ ID NO: 1142 - protein, 17 aa, synthetic construct
HISNGGDYIYYADTVKG

SEQ ID NO: 1143 - protein, 12 aa, synthetic construct
PSYYSDPWFFDV

SEQ ID NO: 1144 - protein, 7 aa, synthetic construct
GFTFRSY

SEQ ID NO: 1145 - protein, 6 aa, synthetic construct
SNGGDY

SEQ ID NO: 1146 - protein, 10 aa, synthetic construct
GFTFRSYAMS

SEQ ID NO: 1147 - protein, 10 aa, synthetic construct
SAGSSVSFMH

SEQ ID NO: 1148 - protein, 7 aa, synthetic construct
DTSKLAS

SEQ ID NO: 1149 - protein, 9 aa, synthetic construct
LQGSGFPLT

SEQ ID NO: 1150 - protein, 6 aa, synthetic construct
GSSVSF

SEQ ID NO: 1151 - protein, 106 aa, synthetic construct
ENVLTQSPAIMSASPGEKVTMTCSAGSSVSFMHWYQQKSSTSPKLWIYDTSKLASGVPGRFSGSGSGNSFSLTISSMEAEDVAIYYCLQGSGFPLTFGSGTKLEIK

SEQ ID NO: 1152 - protein, 121 aa, synthetic construct
DVKLVESGEGLVKPGGSLKLSCAASGFTFRSYAMSWVRQTPEKRLEWVAHISNGGDYIYYADTVKGRFTISRDNARNTLYLQMSSLKSEDTAMYYCTRPSYYSDPWFFDVWGTGTTVTVSS

SEQ ID NO: 1153 - protein, 121 aa, synthetic construct
EVQLVESGGGLVQPGGSLRLSCAASGFTFRSYAMSWVRQAPGKGLEWVAHISNGGDYIYYADTVKGRFTISRDNAKNSLYLQMNSLRAEDTAVYYCTRPSYYSDPWFFDVWGQGTTVTVSS

SEQ ID NO: 1154 - protein, 121 aa, synthetic construct
QVQLVESGGGVVQPGRSLRLSCAASGFTFRSYAMSWVRQAPGKGLEWVAHISNGGDYIYYADTVKGRFTISRDNSKNTLYLQMSSLRAEDTAVYYCTRPSYYSDPWFFDVWGQGTTVTVSS

SEQ ID NO: 1155 - protein, 121 aa, synthetic construct
EVQLVESGGGLVQPGGSLRLSCAASGFTFRSYAMSWVRQAPGKGLEWVAHISNGGDYIYYADTVKGRFTISRDNSKNTLYLQMNSLRAEDTAVYYCTRPSYYSDPWFFDVWGQGTTVTVSS

SEQ ID NO: 1156 - protein, 121 aa, synthetic construct
QVQLVQSGSELKKPGASVKVSCKASGFTFRSYAMSWVRQAPGQGLEWVAHISNGGDYIYYADTVKGRFVISRDNSVNTLYLQISSLKAEDTAVYYCTRPSYYSDPWFFDVWGQGTTVTVSS

SEQ ID NO: 1157 - protein, 121 aa, synthetic construct
QVQLVQSGAEVKKPGASVKVSCKASGFTFRSYAMSWVRQAPGQRLEWVAHISNGGDYIYYADTVKGRFTITRDNSANTLYMELSSLRSEDTAVYYCTRPSYYSDPWFFDVWGQGTTVTVSS

SEQ ID NO: 1158 - protein, 106 aa, synthetic construct
ENVLTQSPATLSLSPGERATLSCSAGSSVSFMHWYQQKPGQAPKLLIYDTSKLASGIPARFSGSGSGNDFTLTISSLEPEDFAVYYCLQGSGFPLTFGQGTKLEIK

SEQ ID NO: 1159 - protein, 106 aa, synthetic construct
ENVLTQSPDFQSVTPKEKVTITCSAGSSVSFMHWYQQKPDQSPKLLIYDTSKLASGVPSRFSGSGSGNDFTLTINSLEAEDAATYYCLQGSGFPLTFGQGTKLEIK

SEQ ID NO: 1160 - protein, 106 aa, synthetic construct
DNQLTQSPSSLSASVGDRVTITCSAGSSVSFMHWYQQKPGKVPKLLIYDTSKLASGVPSRFSGSGSGNDFTLTISSLQPEDVATYYCLQGSGFPLTFGQGTKLEIK

SEQ ID NO: 1161 - protein, 106 aa, synthetic construct
ANQLTQSPSSLSASVGDRVTITCSAGSSVSFMHWYQQKPGKAPKLLIYDTSKLASGVPSRFSGSGSGNDFTLTISSLQPEDFATYYCLQGSGFPLTFGQGTKLEIK

SEQ ID NO: 1162 - protein, 106 aa, synthetic construct
DNVLTQSPDSLAVSLGERATINCSAGSSVSFMHWYQQKPGQPPKLLIYDTSKLASGVPDRFSGSGSGNDFTLTISSLQAEDVAVYYCLQGSGFPLTFGQGTKLEIK

SEQ ID NO: 1163 - protein, 5 aa, synthetic construct
DYNIH

SEQ ID NO: 1164 - protein, 17 aa, synthetic construct
YINPYNGRTGYNQKFKA

SEQ ID NO: 1165 - protein, 9 aa, synthetic construct
WDGSSYFDY

SEQ ID NO: 1166 - protein, 10 aa, synthetic construct
GYTFTDYNIH

SEQ ID NO: 1167 - protein, 6 aa, synthetic construct
NPYNGR

SEQ ID NO: 1168 - protein, 10 aa, synthetic construct
SASSSVSYMH

SEQ ID NO: 1169 - protein, 7 aa, synthetic construct
EISKLAS

SEQ ID NO: 1170 - protein, 9 aa, synthetic construct
QQWNYPLLT

SEQ ID NO: 1171 - protein, 6 aa, synthetic construct
SSSVSY

SEQ ID NO: 1172 - protein, 118 aa, synthetic construct
EVQLQQSGPVLVKPGASVRMSCKASGYTFTDYNIHWVKQSHGRSLEWVGYINPYNGRTGYNQKFKAKATLTVDKSSSTAYMDLRSLTSEDSAVYYCARWDGSSYFDYWGQGTTLTVSS

SEQ ID NO: 1173 - protein, 118 aa, synthetic construct
QVQLVQSGAEVKKPGSSVKVSCKASGYTFTDYNIHWVRQAPGQGLEWVGYINPYNGRTGYNQKFKARATLTVDKSTSTAYMELSSLRSEDTAVYYCARWDGSSYFDYWGQGTTVTVSS

SEQ ID NO: 1174 - protein, 118 aa, synthetic construct
QVQLVQSGAEVKKPGASVKVSCKASGYTFTDYNIHWVRQAPGQGLEWVGYINPYNGRTGYNQKFKARATLTVDKSTSTAYMELRSLRSDDMAVYYCARWDGSSYFDYWGQGTTVTVSS

SEQ ID NO: 1175 - protein, 118 aa, synthetic construct
QVQLVQSGAEVKKPGASVKVSCKASGYTFTDYNIHWVRQATGQGLEWVGYINPYNGRTGYNQKFKARATLTVNKSISTAYMELSSLRSEDTAVYYCARWDGSSYFDYWGQGTTVTVSS

SEQ ID NO: 1176 - protein, 118 aa, synthetic construct
EVQLVESGGGLVQPGRSLRLSCTASGYTFTDYNIHWVRQAPGKGLEWVGYINPYNGRTGYNQKFKARATLSVDKSKSIAYLQMNSLKTEDTAVYYCARWDGSSYFDYWGQGTTVTVSS

SEQ ID NO: 1177 - protein, 118 aa, synthetic construct
QVQLVQSGSELKKPGASVKVSCKASGYTFTDYNIHWVRQAPGQGLEWVGYINPYNGRTGYNQKFKARAVLSVDKSVSTAYLQISSLKAEDTAVYYCARWDGSSYFDYWGQGTTVTVSS

SEQ ID NO: 1178 - protein, 106 aa, synthetic construct
EIVLTQSPATLSLSPGERATLSCSASSSVSYMHWYQQKPGQAPKLLIYEISKLASGIPARFSGSGSGTDYTLTISSLEPEDFAVYYCQQWNYPLLTFGQGTKLEIK

SEQ ID NO: 1179 - protein, 106 aa, synthetic construct
EIVLTQSPATLSLSPGERATLSCSASSSVSYMHWYQQKPGQAPKLLIYEISKLASGIPARFSGSGSGTDYTLTISRLEPEDFAVYYCQQWNYPLLTFGQGTKLEIK

SEQ ID NO: 1180 - protein, 106 aa, synthetic construct
EIVLTQSPDFQSVTPKEKVTITCSASSSVSYMHWYQQKPDQSPKLLIYEISKLASGVPSRFSGSGSGTDYTLTINSLEAEDAATYYCQQWNYPLLTFGQGTKLEIK

SEQ ID NO: 1181 - protein, 106 aa, synthetic construct
DIQLTQSPSFLSASVGDRVTITCSASSSVSYMHWYQQKPGKAPKLLIYEISKLASGVPSRFSGSGSGTEYTLTISSLQPEDFATYYCQQWNYPLLTFGQGTKLEIK

SEQ ID NO: 1182 - protein, 106 aa, synthetic construct
AIQLTQSPSSLSASVGDRVTITCSASSSVSYMHWYQQKPGKAPKLLIYEISKLASGVPSRFSGSGSGTDYTLTISSLQPEDFATYYCQQWNYPLLTFGQGTKLEIK

SEQ ID NO: 1183 - protein, 106 aa, synthetic construct
AIRLTQSPFSLSASVGDRVTITCSASSSVSYMHWYQQKPAKAPKLFIYEISKLASGVPSRFSGSGSGTDYTLTISSLQPEDFATYYCQQWNYPLLTFGQGTKLEIK

SEQ ID NO: 1184 - protein, 106 aa, synthetic construct
DIVLTQSPDSLAVSLGERATINCSASSSVSYMHWYQQKPGQPPKLLIYEISKLASGVPDRFSGSGSGTDYTLTISSLQAEDVAVYYCQQWNYPLLTFGQGTKLEIK

SEQ ID NO: 1185 - protein, 5 aa, synthetic construct
GSWMN

SEQ ID NO: 1186 - protein, 17 aa, synthetic construct
RIYPGDGDTDYSGKFKG

SEQ ID NO: 1187 - protein, 12 aa, synthetic construct
SGYFNYVPVFDY

SEQ ID NO: 1188 - protein, 7 aa, synthetic construct
GYTFSGS

SEQ ID NO: 1189 - protein, 6 aa, synthetic construct
YPGDGD

SEQ ID NO: 1190 - protein, 10 aa, synthetic construct
GYTFSGSWMN

SEQ ID NO: 1191 - protein, 10 aa, synthetic construct
SANSTVGYIH

SEQ ID NO: 1192 - protein, 7 aa, synthetic construct
TTSNLAS

SEQ ID NO: 1193 - protein, 8 aa, synthetic construct
HQWSFYPT

SEQ ID NO: 1194 - protein, 6 aa, synthetic construct
NSTVGY

SEQ ID NO: 1195 - protein, 105 aa, synthetic construct
QIVLTQSPAIMSASLGEEIALTCSANSTVGYIHWYQQKSGTSPKLLIYTTSNLASGVPSRFSGSGSGTFYSLTISSVEAEDAADYFCHQWSFYPTFGGGTKLEIK

SEQ ID NO: 1196 - protein, 121 aa, synthetic construct
QIQLQQSGPEVVKPGASVQISCKASGYTFSGSWMNWVKQRPGKGLEWIGRIYPGDGDTDYSGKFKGRATLTADKSSSTAYMRLSSLTSEDSAVYFCARSGYFNYVPVFDYWGQGTTLSVSS

SEQ ID NO: 1197 - protein, 121 aa, synthetic construct
QIQLVQSGAEVKKPGASVKVSCKASGYTFSGSWMNWVRQAPGQGLEWIGRIYPGDGDTDYSGKFKGRATLTADKSTSTAYMELSSLRSEDTAVYYCARSGYFNYVPVFDYWGQGTTVTVSS

SEQ ID NO: 1198 - protein, 121 aa, synthetic construct
QIQLVQSGAEVKKPGSSVKVSCKASGYTFSGSWMNWVRQAPGQGLEWIGRIYPGDGDTDYSGKFKGRATLTADKSTSTAYMELSSLRSEDTAVYYCARSGYFNYVPVFDYWGQGTTVTVSS

SEQ ID NO: 1199 - protein, 121 aa, synthetic construct
EIQLVQSGAEVKKPGESLKISCKASGYTFSGSWMNWVRQMPGKGLEWIGRIYPGDGDTDYSGKFKGQATLSADKSISTAYLQWSSLKASDTAMYYCARSGYFNYVPVFDYWGQGTTVTVSS

SEQ ID NO: 1200 - protein, 121 aa, synthetic construct
QIQLVQSGSELKKPGASVKVSCKASGYTFSGSWMNWVRQAPGQGLEWIGRIYPGDGDTDYSGKFKGRAVLSADKSVSTAYLQISSLKAEDTAVYYCARSGYFNYVPVFDYWGQGTTVTVSS

SEQ ID NO: 1201 - protein, 121 aa, synthetic construct
QIQLVQSGSELKKPGASVKVSCKASGYTFSGSWMNWVRQAPGQGLEWIGRIYPGDGDTDYSGKFKGRAVLSADKSVSMAYLQISSLKAEDTAVYYCARSGYFNYVPVFDYWGQGTTVTVSS

SEQ ID NO: 1202 - protein, 121 aa, synthetic construct
EIQLVESGGGLVQPGRSLRLSCTASGYTFSGSWMNWVRQAPGKGLEWIGRIYPGDGDTDYSGKFKGRATLSADKSKSIAYLQMNSLKTEDTAVYYCARSGYFNYVPVFDYWGQGTTVTVSS

SEQ ID NO: 1203 - protein, 105 aa, synthetic construct
EIVLTQSPATLSLSPGERATLSCSANSTVGYIHWYQQKPGQAPKLLIYTTSNLASGIPARFSGSGSGTDYTLTISSLEPEDFAVYFCHQWSFYPTFGQGTKLEIK

SEQ ID NO: 1204 - protein, 105 aa, synthetic construct
DIQLTQSPSFLSASVGDRVTITCSANSTVGYIHWYQQKPGKAPKLLIYTTSNLASGVPSRFSGSGSGTEYTLTISSLQPEDFATYFCHQWSFYPTFGQGTKLEIK

SEQ ID NO: 1205 - protein, 105 aa, synthetic construct
EIVLTQSPATLSLSPGERATLSCSANSTVGYIHWYQQKPGQAPKLLIYTTSNLASGIPARFSGSGPGTDYTLTISSLEPEDFAVYFCHQWSFYPTFGQGTKLEIK

SEQ ID NO: 1206 - protein, 105 aa, synthetic construct
DIVLTQSPDSLAVSLGERATINCSANSTVGYIHWYQQKPGQPPKLLIYTTSNLASGVPDRFSGSGSGTDYTLTISSLQAEDVAVYFCHQWSFYPTFGQGTKLEIK

SEQ ID NO: 1207 - protein, 105 aa, synthetic construct
EIVLTQSPDFQSVTPKEKVTITCSANSTVGYIHWYQQKPDQSPKLLIYTTSNLASGVPSRFSGSGSGTDYTLTINSLEAEDAATYFCHQWSFYPTFGQGTKLEIK

SEQ ID NO: 1208 - protein, 5 aa, synthetic construct
DYYMY

SEQ ID NO: 1209 - protein, 17 aa, synthetic construct
TISGGGSYTYSPDSVKG

SEQ ID NO: 1210 - protein, 14 aa, synthetic construct
ERDIYYGNFNAMVY

SEQ ID NO: 1211 - protein, 7 aa, synthetic construct
GFTFSDY

SEQ ID NO: 1212 - protein, 6 aa, synthetic construct
SGGGSY

SEQ ID NO: 1213 - protein, 10 aa, synthetic construct
GFTFSDYYMY

SEQ ID NO: 1214 - protein, 15 aa, synthetic construct
RASKSVSTSGYSYMH

SEQ ID NO: 1215 - protein, 7 aa, synthetic construct
LASNLES

SEQ ID NO: 1216 - protein, 9 aa, synthetic construct
QHSRDLPWT

SEQ ID NO: 1217 - protein, 11 aa, synthetic construct
SKSVSTSGYSY

SEQ ID NO: 1218 - protein, 111 aa, synthetic construct
DIVLTQSPVSLTVSLGQRATISCRASKSVSTSGYSYMHWYQQKPGQPPKLLIYLASNLESGVPARFSGSGSGTDFTLNIHPVEEEDAATYYCQHSRDLPWTFGGGTKLEIK

SEQ ID NO: 1219 - protein, 123 aa, synthetic construct
EVQLVESGGGLVKPGGSLKLSCAASGFTFSDYYMYWVRQTPEKRLEWVATISGGGSYTYSPDSVKGRFTISRDNAKNNLYLQMSSLRSEDTAMYFCARERDIYYGNFNAMVYWGRGTSVTVSS

SEQ ID NO: 1220 - protein, 123 aa, synthetic construct
EVQLLESGGGLVQPGGSLRLSCAASGFTFSDYYMYWVRQAPGKGLEWVATISGGGSYTYSPDSVKGRFTISRDNSKNTLYLQMNSLRAEDTAVYYCARERDIYYGNFNAMVYWGRGTLVTVSS

SEQ ID NO: 1221 - protein, 123 aa, synthetic construct
EVQLVESGGGLVQPGGSLRLSCAASGFTFSDYYMYWVRQAPGKGLEWVATISGGGSYTYSPDSVKGRFTISRDNAKNSLYLQMNSLRAEDTAVYYCARERDIYYGNFNAMVYWGRGTLVTVSS

SEQ ID NO: 1222 - protein, 123 aa, synthetic construct
QVQLVESGGGVVQPGRSLRLSCAASGFTFSDYYMYWVRQAPGKGLEWVATISGGGSYTYSPDSVKGRFTISRDNSKNTLYLQMNSLRAEDTAVYYCARERDIYYGNFNAMVYWGRGTLVTVSS

SEQ ID NO: 1223 - protein, 123 aa, synthetic construct
QVQLVESGGGLVKPGGSLRLSCAASGFTFSDYYMYWIRQAPGKGLEWVATISGGGSYTYSPDSVKGRFTISRDNAKNSLYLQMNSLRAEDTAVYYCARERDIYYGNFNAMVYWGRGTLVTVSS

SEQ ID NO: 1224 - protein, 111 aa, synthetic construct
EIVLTQSPGTLSLSPGERATLSCRASKSVSTSGYSYMHWYQQKPGQAPRLLIYLASNLESGIPDRFSGSGSGTDFTLTISRLEPEDFAVYYCQHSRDLPWTFGGGTKVEIK

SEQ ID NO: 1225 - protein, 111 aa, synthetic construct
EIVLTQSPATLSLSPGERATLSCRASKSVSTSGYSYMHWYQQKPGQAPRLLIYLASNLESGIPARFSGSGSGTDFTLTISSLEPEDFAVYYCQHSRDLPWTFGGGTKVEIK

SEQ ID NO: 1226 - protein, 111 aa, synthetic construct
DIQLTQSPSTLSASVGDRVTITCRASKSVSTSGYSYMHWYQQKPGKAPKLLIYLASNLESGVPSRFSGSGSGTEFTLTISSLQPDDFATYYCQHSRDLPWTFGGGTKVEIK

SEQ ID NO: 1227 - protein, 111 aa, synthetic construct
AIQLTQSPSSLSASVGDRVTITCRASKSVSTSGYSYMHWYQQKPGKAPKLLIYLASNLESGVPSRFSGSGSGTDFTLTISSLQPEDFATYYCQHSRDLPWTFGGGTKVEIK

SEQ ID NO: 1228 - skipped

SEQ ID NO: 1229 - protein, 5 aa, synthetic construct
GYFWN

SEQ ID NO: 1230 - protein, 16 aa, synthetic construct
YISYDGSNNYNPSLKN

SEQ ID NO: 1231 - protein, 11 aa, synthetic construct
PSPGTGYAVDY

SEQ ID NO: 1232 - protein, 8 aa, synthetic construct
GYSITSGY

SEQ ID NO: 1233 - protein, 6 aa, synthetic construct
SYDGSN

SEQ ID NO: 1234 - protein, 11 aa, synthetic construct
GYSITSGYFWN

SEQ ID NO: 1235 - protein, 16 aa, synthetic construct
RSSQSLVHSNGNTYLH

SEQ ID NO: 1236 - protein, 7 aa, synthetic construct
KVSNRFS

SEQ ID NO: 1237 - protein, 9 aa, synthetic construct
SQSTHVPFT

SEQ ID NO: 1238 - protein, 12 aa, synthetic construct
SQSLVHSNGNTY

SEQ ID NO: 1239 - protein, 112 aa, synthetic construct
NVVMTQTPLSLPVSLGDQASISCRSSQSLVHSNGNTYLHWYLQKPGQSPKFLIYKVSNRFSGVPDRFSGGGSGTEFTLKISRVEAEDLGVYFCSQSTHVPFTFGSGTKLEIK

SEQ ID NO: 1240 - protein, 120 aa, synthetic construct
NVQLQESGPGLVKPSQSLSLTCSVAGYSITSGYFWNWIRQFPGNKLEWMGYISYDGSNNYNPSLKNRISITRDTSKNQFFLKLNSVTTEDTATYYCASPSPGTGYAVDYWGQGTSVTVSS

SEQ ID NO: 1241 - protein, 120 aa, synthetic construct
QVQLQESGPGLVKPSETLSLTCTVSGYSITSGYFWNWIRQPPGKGLEWIGYISYDGSNNYNPSLKNRVTISRDTSKNQFSLKLSSVTAADTAVYYCASPSPGTGYAVDYWGQGTLVTVSS

SEQ ID NO: 1242 - protein, 120 aa, synthetic construct; identical to SEQ ID NO: 1241

SEQ ID NO: 1243 - protein, 120 aa, synthetic construct
QVQLVESGGGLVQPGGSLRLSCSVSGYSITSGYFWNWVRQAPGKGLEWVGYISYDGSNNYNPSLKNRFTISRDTSKNTFYLQMNSLRAEDTAVYYCASPSPGTGYAVDYWGQGTLVTVSS

SEQ ID NO: 1244 - protein, 111 aa, synthetic construct
VVMTQSPGTLSLSPGERATLSCRSSQSLVHSNGNTYLHWYQQKPGQAPRFLIYKVSNRFSGIPDRFSGSGSGTDFTLTISRLEPEDFAVYFCSQSTHVPFTFGQGTKLEIK

SEQ ID NO: 1245 - protein, 112 aa, synthetic construct
EVVMTQSPATLSLSPGERATLSCRSSQSLVHSNGNTYLHWYQQKPGQAPRFLIYKVSNRFSGIPARFSGSGSGTDFTLTISSLEPEDFAVYFCSQSTHVPFTFGQGTKLEIK

SEQ ID NO: 1246 - protein, 112 aa, synthetic construct
EVVMTQSPATLSVSPGERATLSCRSSQSLVHSNGNTYLHWYQQKPGQAPRFLIYKVSNRFSGIPARFSGSGSGTEFTLTISSLQSEDFAVYFCSQSTHVPFTFGQGTKLEIK

SEQ ID NO: 1247 - protein, 112 aa, synthetic construct
DVQMTQSPSSLSASVGDRVTITCRSSQSLVHSNGNTYLHWYQQKPGKAPKFLIYKVSNRFSGVPSRFSGSGSGTDFTFTISSLQPEDIATYFCSQSTHVPFTFGQGTKLEIK

SEQ ID NO: 1248 - protein, 5 aa, synthetic construct
DYIVH

SEQ ID NO: 1249 - protein, 17 aa, synthetic construct
WINTYTGTPTYADDFEG

SEQ ID NO: 1250 - protein, 13 aa, synthetic construct
SWRRGIRGIGFDY

SEQ ID NO: 1251 - protein, 7 aa, synthetic construct
GYTFTDY

SEQ ID NO: 1252 - protein, 6 aa, synthetic construct
NTYTGT

SEQ ID NO: 1253 - protein, 10 aa, synthetic construct
GYTFTDYIVH

SEQ ID NO: 1254 - protein, 11 aa, synthetic construct
KASKSINKYLA

SEQ ID NO: 1255 - protein, 7 aa, synthetic construct
DGSTLQS

SEQ ID NO: 1256 - protein, 9 aa, synthetic construct
QQHNEYPPT

SEQ ID NO: 1257 - protein, 7 aa, synthetic construct
SKSINKY

SEQ ID NO: 1258 - protein, 107 aa, synthetic construct
DVQMTQSPYNLAASPGESVSINCKASKSINKYLAWYQQKPGKPNKLLIYDGSTLQSGIPSRFSGSGSGTDFTLTIRGLEPEDFGLYYCQQHNEYPPTFGAGTKLELK

SEQ ID NO: 1259 - protein, 122 aa, synthetic construct
QLQLVQSGPELREPGESVKISCKASGYTFTDYIVHWVKQAPGKGLKWMGWINTYTGTPTYADDFEGRFVFSLEASASTANLQISNLKNEDTATYFCARSWRRGIRGIGFDYWGQGVMVTVSS

SEQ ID NO: 1260 - protein, 122 aa, synthetic construct
QLQLVQSGAEVKKPGASVKVSCKASGYTFTDYIVHWVRQAPGQGLEWMGWINTYTGTPTYADDFEGWVTMTLDASISTAYMELSRLRSDDTAVYYCARSWRRGIRGIGFDYWGQGTMVTVSS

SEQ ID NO: 1261 - protein, 122 aa, synthetic construct
QLQLVQSGAEVKKPGASVKVSCKASGYTFTDYIVHWVRQAPGQGLEWMGWINTYTGTPTYADDFEGRVTMTLDASTSTAYMELSSLRSEDTAVYYCARSWRRGIRGIGFDYWGQGTMVTVSS

SEQ ID NO: 1262 - protein, 122 aa, synthetic construct
QLQLVQSGAEVKKPGASVKVSCKASGYTFTDYIVHWVRQAPGQRLEWMGWINTYTGTPTYADDFEGRVTITLDASASTAYMELSSLRSEDMAVYYCARSWRRGIRGIGFDYWGQGTMVTVSS

SEQ ID NO: 1263 - protein, 122 aa, synthetic construct
QLQLVQSGAEVKKPGASVKVSCKASGYTFTDYIVHWVRQATGQGLEWMGWINTYTGTPTYADDFEGRVTMTLNASISTAYMELSSLRSEDTAVYYCARSWRRGIRGIGFDYWGQGTMVTVSS

SEQ ID NO: 1264 - protein, 107 aa, synthetic construct
EVVMTQSPGTLSLSPGERATLSCKASKSINKYLAWYQQKPGQAPRLLIYDGSTLQSGIPDRFSGSGSGTDFTLTISRLEPEDFAVYYCQQHNEYPPTFGQGTKLEIK

SEQ ID NO: 1265 - protein, 107 aa, synthetic construct
EVVMTQSPATLSLSPGERATLSCKASKSINKYLAWYQQKPGQAPRLLIYDGSTLQSGIPARFSGSGSGTDFTLTISSLEPEDFAVYYCQQHNEYPPTFGQGTKLEIK

SEQ ID NO: 1266 - protein, 107 aa, synthetic construct
DVQMTQSPSSLSASVGDRVTITCKASKSINKYLAWYQQKPGKAPKLLIYDGSTLQSGVPSRFSGSGSGTDFTLTISSLQPEDFATYYCQQHNEYPPTFGQGTKLEIK

SEQ ID NO: 1267 - protein, 107 aa, synthetic construct
AVRMTQSPSSFSASTGDRVTITCKASKSINKYLAWYQQKPGKAPKLLIYDGSTLQSGVPSRFSGSGSGTDFTLTISCLQSEDFATYYCQQHNEYPPTFGQGTKLEIK

SEQ ID NO: 1268 - protein, 5 aa, synthetic construct
NYGVH

SEQ ID NO: 1269 - protein, 16 aa, synthetic construct
VIWSDGSTDYDTAFIS

SEQ ID NO: 1270 - protein, 9 aa, synthetic construct
RAVVADFDY

SEQ ID NO: 1271 - protein, 6 aa, synthetic construct
GFSLTN

SEQ ID NO: 1272 - protein, 9 aa, synthetic construct
VIWSDGSTD

SEQ ID NO: 1273 - protein, 10 aa, synthetic construct
GFSLTNYGVH

SEQ ID NO: 1274 - protein, 117 aa, synthetic construct
QVQLKQSGPGLLQPSQSLSITCTVSGFSLTNYGVHWVRQSPGKGLEWLGVIWSDGSTDYDTAFISRLSISKDNSKSQVFFKLNSLQADDTAIYYCARRAVVADFDYWGQGTTLTVSS

SEQ ID NO: 1275 - protein, 16 aa, synthetic construct
KASKEVTIFGSISALH

SEQ ID NO: 1276 - protein, 7 aa, synthetic construct
NGAKLES

SEQ ID NO: 1277 - protein, 9 aa, synthetic construct
LQNKEVPFT

SEQ ID NO: 1278 - protein, 119 aa, synthetic construct
DIVLTQSPASLAVSLGQKATISCKASKEVTIFGSISALHWYQQKPGQPPKLIYNGAKLESGVSARFSDSGSQNRSPFGNQLSFTLTIAPVEADDAATYYCLQNKEVPFTFGSGTKLEIK

SEQ ID NO: 1279 - protein, 117 aa, synthetic construct
DIVLTQSPDSLAVSLGERATINCKASKEVTIFGSISALHWYQQKPGQPPKLLYNGAKLESGVSARFGVPDRFSRSGSGLDFTLTISSLQAEDVAVYYCLQNKEVPFTFGQGTKLEIK

SEQ ID NO: 1280 - protein, 117 aa, synthetic construct
EIVLTQSPDFQSVTPKEKVTITCKASKEVTIFGSISALHWYQQKPDQSPKLLYNGAKLESGVSARFGVPSRFSRSGSGLDFTLTINSLEAEDAATYYCLQNKEVPFTFGQGTKLEIK

SEQ ID NO: 1281 - protein, 117 aa, synthetic construct
AIQLTQSPSSLSASVGDRVTITCKASKEVTIFGSISALHWYQQKPGKAPKLLYNGAKLESGVSARFGVPSRFSRSGSGLDFTLTISSLQPEDFATYYCLQNKEVPFTFGQGTKLEIK

SEQ ID NO: 1282 - protein, 117 aa, synthetic construct
DIVLTQTPLSLSVTPGQPASISCKASKEVTIFGSISALHWYLQKPGQPPKLLYNGAKLESGVSARFGVPDRFSRSGSGLDFTLKISRVEAEDVGVYYCLQNKEVPFTFGQGTKLEIK

SEQ ID NO: 1283 - protein, 117 aa, synthetic construct
QVTLKESGPVLVKPTETLTLTCTVSGFSLTNYGVHWVRQPPGKALEWLGVIWSDGSTDYDTAFISRLTISKDNSKSQVVLTMTNMDPVDTATYYCARRAVVADFDYWGQGTTVTVSS

SEQ ID NO: 1284 - protein, 117 aa, synthetic construct
QVQLQESGPGLVKPSGTLSLTCAVSGFSLTNYGVHWVRQPPGKGLEWLGVIWSDGSTDYDTAFISRLTISKDNSKSQVSLKLSSVTAADTAVYYCARRAVVADFDYWGQGTTVTVSS

SEQ ID NO: 1285 - protein, 117 aa, synthetic construct
QVQLQQSGPGLVKPSQTLSLTCAVSGFSLTNYGVHWVRQSPSRGLEWLGVIWSDGSTDYDTAFISRLTINKDNSKSQVSLQLNSVTPEDTAVYYCARRAVVADFDYWGQGTTVTVSS

SEQ ID NO: 1286 - protein, 117 aa, synthetic construct
EVQLVESGGGLVQPGPSLRLSCTVSGFSLTNYGVHWVRQAPGKGLEWLGVIWSDGSTDYDTAFISRLTISKDNSKSIVYLQMNSLKTEDTAVYYCARRAVVADFDYWGQGTTVTVSS

SEQ ID NO: 1287 - protein, 117 aa, synthetic construct
EVQLVQSGAEVKKPGESLRISCKVSGFSLTNYGVHWVRQMPGKGLEWLGVIWSDGSTDYDTAFISQLTISKDNSISTVYLQWSSLKASDTAMYYCARRAVVADFDYWGQGTTVTVSS

SEQ ID NO: 1288 - protein, 5 aa, synthetic construct
SYGMS

SEQ ID NO: 1289 - protein, 17 aa, synthetic construct
LISSGGSYTYYTDSVKG

SEQ ID NO: 1290 - protein, 8 aa, synthetic construct
HGGNFFDY

SEQ ID NO: 1291 - protein, 7 aa, synthetic construct
GFTFRSY

SEQ ID NO: 1292 - protein, 6 aa, synthetic construct
SSGGSY

SEQ ID NO: 1293 - protein, 10 aa, synthetic construct
GFTFRSYGMS

SEQ ID NO: 1294 - protein, 10 aa, synthetic construct
SVSSSVSYMH

SEQ ID NO: 1295 - protein, 7 aa, synthetic construct
DTSKLAS

SEQ ID NO: 1296 - protein, 10 aa, synthetic construct
QQWSSNPQYT

SEQ ID NO: 1297 - protein, 6 aa, synthetic construct
SSSVSY

SEQ ID NO: 1298 - protein, 5 aa, synthetic construct
SSWMN

SEQ ID NO: 1299 - protein, 17 aa, synthetic construct
RIYPGDGDTKYNGKFKG

SEQ ID NO: 1300 - protein, 10 aa, synthetic construct
RGTGGWYFDV

SEQ ID NO: 1301 - protein, 10 aa, synthetic construct
RGTGGWYFDV

SEQ ID NO: 1302 - protein, 7 aa, synthetic construct
GYAFSSS

SEQ ID NO: 1303 - protein, 6 aa, synthetic construct
YPGDGD

SEQ ID NO: 1304 - protein, 10 aa, synthetic construct
GYAFSSSWMN

SEQ ID NO: 1305 - protein, 15 aa, synthetic construct
RASESVDSSGNSFMH

SEQ ID NO: 1306 - protein, 7 aa, synthetic construct
RASNLES

SEQ ID NO: 1307 - protein, 9 aa, synthetic construct
QQSFDDPFT

SEQ ID NO: 1308 - protein, 11 aa, synthetic construct
SESVDSSGNSF

SEQ ID NO: 1309 - protein, 246 aa, synthetic construct
QVQLVQSGAEVKKPGSSVKVSCKASGHDFDKFYIHWVRQAPGQGLEWMGRVSAGSGNVKYNEKFKGRVTITADTSTSTAYMELSSLRSEDTAVYYCAGSYYSYDVLDYWGQGTTVTVSSGGGGSGGGGSGGGGSGGGGSDIQMTQSPSFLSASVGDRVTITCKASQNVGNRVAWYQQKPGKAPKALIYSSSHRYKGVPSRFSGSGSGTEFTLTISSLQPEDFATYFCQQFKSYPLTFGQGTKLEIK

SEQ ID NO: 1310 - protein, 119 aa, synthetic construct; identical to SEQ ID NO: 94

SEQ ID NO: 1311 - protein, 119 aa, synthetic construct
QVQLVQSGAEVKKPGSSVKVSCKASGTDFKLTYIHWVRQAPGQGLEWMGRIFPGSGNVKYNEKFKGRVTITADTSTSTAYMELSSLRSEDTAVYYCAVSYYSYDVLDYWGQGTTVTVSS

SEQ ID NO: 1312 - protein, 119 aa, synthetic construct
QVQLVQSGAEVKKPGSSVKVSCKASGHDFRLTYIHWVRQAPGQGLEWMGRISAGSGNVKYNEKFKGRVTITADTSTSTAYMELSSLRSEDTAVYYCAVSYYSYDVLDYWGQGTTVTVSS

SEQ ID NO: 1313 - protein, 107 aa, synthetic construct; identical to SEQ ID NO: 90

SEQ ID NO: 1314 - protein, 107 aa, synthetic construct; identical to SEQ ID NO: 141

SEQ ID NO: 1315 - protein, 5 aa, synthetic construct
AYGVN

SEQ ID NO: 1316 - protein, 16 aa, synthetic construct
MIWGDGNTDYNSALKS

SEQ ID NO: 1317 - protein, 12 aa, synthetic construct
DRVTATLYAMDY

SEQ ID NO: 1318 - protein, 7 aa, synthetic construct
GFSLTAY

SEQ ID NO: 1319 - protein, 5 aa, synthetic construct
WGDGN

SEQ ID NO: 1320 - protein, 10 aa, synthetic construct
GFSLTAYGVN

SEQ ID NO: 1321 - protein, 11 aa, synthetic construct
SASQGISNYLN

SEQ ID NO: 1322 - protein, 7 aa, synthetic construct
YTSSLHS

SEQ ID NO: 1323 - protein, 9 aa, synthetic construct
QQYSKLPRT

SEQ ID NO: 1324 - protein, 107 aa, synthetic construct
DIQMTQSPSSLSASVGDRVTITCSASQGISNYLNWYQQTPGKAPKLLIYYTSSLHSGVPSRFSGSGSGTDYTFTISSLQPEDIATYYCQQYSKLPRTFGQGTKLQIT

SEQ ID NO: 1325 - protein, 120 aa, synthetic construct
QVQLQESGPGLVRPSQTLSLTCTVSGFSLTAYGVNWVRQPPGRGLEWLGMIWGDGNTDYNSALKSRVTMLKDTSKNQFSLRLSSVTAADTAVYYCARDRVTATLYAMDYWGQGSLVTVSS

SEQ ID NO: 1326 - protein, 246 aa, synthetic construct
QVQLVQSGAEVKKPGSSVKVSCKASGHDFRLTYIHWVRQAPGQGLEWMGRVSAGSGNTKYNEKFKGRVTITADTSTSTAYMELSSLRSEDTAVYYCAVSYYSYDVLDYWGQGTTVTVSSGGGGSGGGGSGGGGSGGGGSDIQMTQSPSFLSASVGDRVTITCKASQNVGDRVVWHQQKPGKAPKALIYSSSHRYKGVPSRFSGSGSGTEFTLTISSLQPEDFATYFCQQFKSYPLTFGQGTKLEIK

SEQ ID NO: 1327 - protein, 246 aa, synthetic construct
QVQLVQSGAEVKKPGSSVKVSCKASGHDFRLTYIHWVRQAPGQGLEWMGRVSAGSGNVKYNEKFKGRVTITADTSTSTAYMELSSLRSEDTAVYYCAVSYYSYDVLDYWGQGTTVTVSSGGGGSGGGGSGGGGSGGGGSDIQMTQSPSFLSASVGDRVTITCKASQNVGNRVVWHQQKPGKAPKALIYSSSHRYKGVPSRFSGSGSGTEFTLTISSLQPEDFATYFCQQFKSYPLTFGQGTKLEIK

SEQ ID NO: 1328 - protein, 246 aa, synthetic construct
QVQLVQSGAEVKKPGSSVKVSCKASGHDFRLTYIHWVRQAPGQGLEWMGRIYAGSGNVKYNEKFKGRVTITADTSTSTAYMELSSLRSEDTAVYYCAVSYYSYDVLDYWGQGTTVTVSSGGGGSGGGGSGGGGSGGGGSDIQMTQSPSFLSASVGDRVTITCKASQNVADRVVWHQQKPGKAPKALIYSSSHRYKGVPSRFSGSGSGTEFTLTISSLQPEDFATYFCQQFKSYPLTFGQGTKLEIK

SEQ ID NO: 1329 - protein, 246 aa, synthetic construct
QVQLVQSGAEVKKPGSSVKVSCKASGHDFKLTYIHWVRQAPGQGLEWMGRVSAGSGNTKYNEKFKGRVTITADTSTSTAYMELSSLRSEDTAVYYCAVSYYSYDVLDYWGQGTTVTVSSGGGGSGGGGSGGGGSGGGGSDIQMTQSPSFLSASVGDRVTITCKASQNVGDRVAWHQQKPGKAPKALIYSSSHRYKGVPSRFSGSGSGTEFTLTISSLQPEDFATYFCQQFKSYPLTFGQGTKLEIK

SEQ ID NO: 1330 - protein, 246 aa, synthetic construct
QVQLVQSGAEVKKPGSSVKVSCKASGHDFKLTYIHWVRQAPGQGLEWMGRVSAGSGNTKYNEKFKGRVTITADTSTSTAYMELSSLRSEDTAVYYCAVSYYSYDVLDYWGQGTTVTVSSGGGGSGGGGSGGGGSGGGGSDIQMTQSPSFLSASVGDRVTITCKASQNVDNRVAWHQQKPGKAPKALIYSSSHRYKGVPSRFSGSGSGTEFTLTISSLQPEDFATYFCQQFKSYPLTFGQGTKLEIK

SEQ ID NO: 1331 - protein, 246 aa, synthetic construct
QVQLVQSGAEVKKPGSSVKVSCKASGHDFRLTYIHWVRQAPGQGLEWMGRVSAGSGNVKYNEKFKGRVTITADTSTSTAYMELSSLRSEDTAVYYCAVSYYSYDVLDYWGQGTTVTVSSGGGGSGGGGSGGGGSGGGGSDIQMTQSPSFLSASVGDRVTITCKASQNVADRVVWHQQKPGKAPKALIYSSSHRYKGVPSRFSGSGSGTEFTLTISSLQPEDFATYFCQQFKSYPLTFGQGTKLEIK

SEQ ID NO: 1332 - protein, 246 aa, synthetic construct
QVQLVQSGAEVKKPGSSVKVSCKASGHDFRLTYIHWVRQAPGQGLEWMGRVYAGSGNTKYNEKFKGRVTITADTSTSTAYMELSSLRSEDTAVYYCAVSYYSYDVLDYWGQGTTVTVSSGGGGSGGGGSGGGGSGGGGSDIQMTQSPSFLSASVGDRVTITCKASQNVEDRVVWHQQKPGKAPKALIYSSSHRYKGVPSRFSGSGSGTEFTLTISSLQPEDFATYFCQQFKSYPLTFGQGTKLEIK

SEQ ID NO: 1333 - protein, 246 aa, synthetic construct
QVQLVQSGAEVKKPGSSVKVSCKASGHDFKLTYIHWVRQAPGQGLEWMGRVSAGSGNTKYNEKFKGRVTITADTSTSTAYMELSSLRSEDTAVYYCAVSYYSYDVLDYWGQGTTVTVSSGGGGSGGGGSGGGGSGGGGSDIQMTQSPSFLSASVGDRVTITCKASQNVADRVVWHQQKPGKAPKALIYSSSHRYKGVPSRFSGSGSGTEFTLTISSLQPEDFATYFCQQFKSYPLTFGQGTKLEIK

SEQ ID NO: 1334 - protein, 246 aa, synthetic construct
QVQLVQSGAEVKKPGSSVKVSCKASGHDFKLTYIHWVRQAPGQGLEWMGRISAGSGNTKYNEKFKGRVTITADTSTSTAYMELSSLRSEDTAVYYCAVSYYSYDVLDYWGQGTTVTVSSGGGGSGGGGSGGGGSGGGGSDIQMTQSPSFLSASVGDRVTITCKASQNVGDRVVWHQQKPGKAPKALIYSSSHRYKGVPSRFSGSGSGTEFTLTISSLQPEDFATYFCQQFKSYPLTFGQGTKLEIK

SEQ ID NO: 1335 - protein, 246 aa, synthetic construct
QVQLVQSGAEVKKPGSSVKVSCKASGHDFKLTYIHWVRQAPGQGLEWMGRIYAGSGNTKYNEKFKGRVTITADTSTSTAYMELSSLRSEDTAVYYCAVSYYSYDVLDYWGQGTTVTVSSGGGGSGGGGSGGGGSGGGGSDIQMTQSPSFLSASVGDRVTITCKASQNVGDRVVWHQQKPGKAPKALIYSSSHRYKGVPSRFSGSGSGTEFTLTISSLQPEDFATYFCQQFKSYPLTFGQGTKLEIK

SEQ ID NO: 1336 - protein, 246 aa, synthetic construct
QVQLVQSGAEVKKPGSSVKVSCKASGTDFKLTYIHWVRQAPGQGLEWMGRIFPGSGNVKYNEKFKGRVTITADTSTSTAYMELSSLRSEDTAVYYCAVSYYSYDVLDYWGQGTTVTVSSGGGGSGGGGSGGGGSGGGGSDIQMTQSPSFLSASVGDRVTITCKASQNVDNRVAWYQQKPGKAPKALIYSSSHRYKGVPSRFSGSGSGTEFTLTISSLQPEDFATYFCQQFKSYPLTFGQGTKLEIK

SEQ ID NO: 1337 - protein, 246 aa, synthetic construct
QVQLVQSGAEVKKPGSSVKVSCKASGHDFRLTYIHWVRQAPGQGLEWMGRISAGSGNVKYNEKFKGRVTITADTSTSTAYMELSSLRSEDTAVYYCAVSYYSYDVLDYWGQGTTVTVSSGGGGSGGGGSGGGGSGGGGSDIQMTQSPSFLSASVGDRVTITCKASQNVADRVAWYQQKPGKAPKALIYSSSHRYKGVPSRFSGSGSGTEFTLTISSLQPEDFATYFCQQFKSYPLTFGQGTKLEIK

SEQ ID NO: 1338 - protein, 243 aa, synthetic construct
EVQLVESGGGLVQPGGSLRLSCAASGFTFSNFGMHWVRQAPGKGLEWVSYISSGSSTIYYADTLKGRFTISRDNSKNTLYLQMNSLRAEDTAVYYCARRGEGAMDYWGQGTTVTVSSGGGGSGGGGSGGGGSGGGGSDNQLTQSPSSLSASVGDRVTITCRASSSVNYIYWYQQKPGKAPKLLIYYTSNLAPGVPSRFSGSGSGNDYTLTISSLQPEDFATYYCQQFTSSPFTFGQGTKLEIK

SEQ ID NO: 1339 - protein, 242 aa, synthetic construct
EVQLVESGGGLVQPGGSLRLSCAASGFTFSNFGMHWVRQAPGKGLEWVSYISSGSSTIYYADTLKGRFTISRDNSKNTLYLQMNSLRAEDTAVYYCARRGEGAMDYWGQGTTVTVSSGGGGSGGGGSGGGGSGGGGSSNELTQPPSVSVSPGQTARITCRASSSVNYIYWYQQKSGQAPVLVIYYTSNLAPGIPERFSGSGSGNMYTLTISGAQVEDEADYYCQQFTSSPFTFGTGTKVTVL

SEQ ID NO: 1340 - protein, 243 aa, synthetic construct
QVQLVESGGGVVQPGRSLRLSCAASGFTFSNFGMHWVRQAPGKGLEWVAYISSGSSTIYYADTLKGRFTISRDNSKNTLYLQMNSLRAEDTAVYYCARRGEGAMDYWGQGTTVTVSSGGGGSGGGGSGGGGSGGGGSDNQLTQSPSFLSASVGDRVTITCRASSSVNYIYWYQQKPGKAPKLLIYYTSNLAPGVPSRFSGSGSGNEYTLTISSLQPEDFATYYCQQFTSSPFTFGQGTKLEIK

SEQ ID NO: 1341 - protein, 243 aa, synthetic construct
QVQLVESGGGVVQPGRSLRLSCAASGFTFSNFGMHWVRQAPGKGLEWVAYISSGSSTIYYADTLKGRFTISRDNSKNTLYLQMNSLRAEDTAVYYCARRGEGAMDYWGQGTTVTVSSGGGGSGGGGSGGGGSGGGGSDNQLTQSPSSLSASVGDRVTITCRASSSVNYIYWYQQKPGKAPKLLIYYTSNLAPGVPSRFSGSGSGNDYTLTISSLQPEDFATYYCQQFTSSPFTFGQGTKLEIK

SEQ ID NO: 1342 - protein, 242 aa, synthetic construct
QVQLVESGGGVVQPGRSLRLSCAASGFTFSNFGMHWVRQAPGKGLEWVAYISSGSSTIYYADTLKGRFTISRDNSKNTLYLQMNSLRAEDTAVYYCARRGEGAMDYWGQGTTVTVSSGGGGSGGGGSGGGGSGGGGSSNELTQPPSVSVSPGQTARITCRASSSVNYIYWYQQKSGQAPVLVIYYTSNLAPGIPERFSGSGSGNMYTLTISGAQVEDEADYYCQQFTSSPFTFGTGTKVTVL

SEQ ID NO: 1343 - skipped

SEQ ID NO: 1344 - protein, 119 aa, synthetic construct
QVQLVQSGAEVKKPGSSVKVSCKASGHDFRLTYIHWVRQAPGQGLEWMGRVSAGSGNTKYNEKFKGRVTITADTSTSTAYMELSSLRSEDTAVYYCAVSYYSYDVLDYWGQGTTVTVSS

SEQ ID NO: 1345 - skipped

SEQ ID NO: 1346 - protein, 119 aa, synthetic construct
QVQLVQSGAEVKKPGSSVKVSCKASGHDFRLTYIHWVRQAPGQGLEWMGRVSAGSGNVKYNEKFKGRVTITADTSTSTAYMELSSLRSEDTAVYYCAVSYYSYDVLDYWGQGTTVTVSS

SEQ ID NO: 1347 - protein, 107 aa, synthetic construct
DIQMTQSPSFLSASVGDRVTITCKASQNVGNRVVWHQQKPGKAPKALIYSSSHRYKGVPSRFSGSGSGTEFTLTISSLQPEDFATYFCQQFKSYPLTFGQGTKLEIK

SEQ ID NO: 1348 - protein, 119 aa, synthetic construct
QVQLVQSGAEVKKPGSSVKVSCKASGHDFRLTYIHWVRQAPGQGLEWMGRIYAGSGNVKYNEKFKGRVTITADTSTSTAYMELSSLRSEDTAVYYCAVSYYSYDVLDYWGQGTTVTVSS

SEQ ID NO: 1349 - protein, 107 aa, synthetic construct
DIQMTQSPSFLSASVGDRVTITCKASQNVADRVVWHQQKPGKAPKALIYSSSHRYKGVPSRFSGSGSGTEFTLTISSLQPEDFATYFCQQFKSYPLTFGQGTKLEIK

SEQ ID NO: 1350 - protein, 119 aa, synthetic construct
QVQLVQSGAEVKKPGSSVKVSCKASGHDFKLTYIHWVRQAPGQGLEWMGRVSAGSGNTKYNEKFKGRVTITADTSTSTAYMELSSLRSEDTAVYYCAVSYYSYDVLDYWGQGTTVTVSS

SEQ ID NO: 1351 - protein, 107 aa, synthetic construct; identical to SEQ ID NO: 160

SEQ ID NO: 1352 - skipped

SEQ ID NO: 1353 - protein, 107 aa, synthetic construct; identical to SEQ ID NO: 199

SEQ ID NO: 1354-1355 - skipped (2 entries)

SEQ ID NO: 1356 - protein, 119 aa, synthetic construct
QVQLVQSGAEVKKPGSSVKVSCKASGHDFRLTYIHWVRQAPGQGLEWMGRVYAGSGNTKYNEKFKGRVTITADTSTSTAYMELSSLRSEDTAVYYCAVSYYSYDVLDYWGQGTTVTVSS

SEQ ID NO: 1357 - protein, 107 aa, synthetic construct
DIQMTQSPSFLSASVGDRVTITCKASQNVEDRVVWHQQKPGKAPKALIYSSSHRYKGVPSRFSGSGSGTEFTLTISSLQPEDFATYFCQQFKSYPLTFGQGTKLEIK

SEQ ID NO: 1358-1359 - skipped (2 entries)

SEQ ID NO: 1360 - protein, 119 aa, synthetic construct
QVQLVQSGAEVKKPGSSVKVSCKASGHDFKLTYIHWVRQAPGQGLEWMGRISAGSGNTKYNEKFKGRVTITADTSTSTAYMELSSLRSEDTAVYYCAVSYYSYDVLDYWGQGTTVTVSS

SEQ ID NO: 1361 - protein, 107 aa, synthetic construct
DIQMTQSPSFLSASVGDRVTITCKASQNVGDRVVWHQQKPGKAPKALIYSSSHRYKGVPSRFSGSGSGTEFTLTISSLQPEDFATYFCQQFKSYPLTFGQGTKLEIK

SEQ ID NO: 1362 - protein, 119 aa, synthetic construct
QVQLVQSGAEVKKPGSSVKVSCKASGHDFKLTYIHWVRQAPGQGLEWMGRIYAGSGNTKYNEKFKGRVTITADTSTSTAYMELSSLRSEDTAVYYCAVSYYSYDVLDYWGQGTTVTVSS

SEQ ID NO: 1363-1364 - skipped (2 entries)

SEQ ID NO: 1365 - protein, 107 aa, synthetic construct
DIQMTQSPSFLSASVGDRVTITCRASQNVDNRLGWHQQKPGKAPKALIYSSSHRYKGVPSRFSGSGSGTEFTLTISSLQPEDFATYFCQQFKSYPLTFGQGTKLEIK

SEQ ID NO: 1366 - skipped

SEQ ID NO: 1367 - protein, 107 aa, synthetic construct
DIQMTQSPSFLSASVGDRVTITCKASQNVDNRVAWHQQKPGKAPKALIYAASSLQKGVPSRFSGSGSGTEFTLTISSLQPEDFATYFCQQFKSYPLTFGQGTKLEIK

SEQ ID NO: 1368 - skipped

SEQ ID NO: 1369 - protein, 107 aa, synthetic construct
DIQMTQSPSFLSASVGDRVTITCKASQNVDNRVAWHQQKPGKAPKALIYSSSHRYKGVPSRFSGSGSGTEFTLTISSLQPEDFATYFCLQHNSYPLTFGQGTKLEIK

SEQ ID NO: 1370 - protein, 119 aa, synthetic construct
QVQLVQSGAEVKKPGSSVKVSCKASGHDFKLTYIHWVRQAPGQGLEWMGRVSAGSGNVNYAQKFQGRVTITADTSTSTAYMELSSLRSEDTAVYYCAVSYYSYDVLDYWGQGTTVTVSS

SEQ ID NO: 1371-1375 - skipped (5 entries)

SEQ ID NO: 1376 - protein, 252 aa, synthetic construct
QVQLQQSGTELMKPGASVKISCKASGYTFSNYWIEWIKQRPGHGLEWVGEILPGAGPTNYNEKFKGKATFTADSSSNTAYMQLSSLTSEDSAVYYCARTDYDYDWFAYWGQGTLVTVSAGGGGSGGGGSGGGGSGGGGSDIVMSQSPSSLAVSVGEKVTMSCKSSQSLLYSGNQKNYLAWYQQKPGQSPKLLIYWASTRESGVPDRFTGSGSGTDFTLTINSVKAEDLTVYYCQQYYGYPRTFGGGTKVEIK

SEQ ID NO: 1377-2000 - skipped (624 entries)

SEQ ID NO: 2001 - protein, 123 aa, synthetic construct
EVQLQQSGPELVKPGASVKISCKASGYSFIGYFMNWVMQSHGRSLEWIGRINPYNGYTFYNQKFKGKATLTVDKSSSTAHMELRSLASEDSAVYYCARHFRYDGVFYYAMDYWGQGTSVTVSS

SEQ ID NO: 2002 - protein, 115 aa, synthetic construct
QLVLTQSSSASFSLGASAKLTCTLSSQHSTFTIEWYQQQPLKPPKYVMDLKKDGSHSTGDGVPDRFSGSSSGADRYLSISNIQPEDEATYICGVGDTIKEQFVYVFGGGTKVTVL

SEQ ID NO: 2003 - protein, 122 aa, synthetic construct
EVQLVESGGGLVQPGGSLRLSCAASGFAFSGYYMAWVRQAPGKGLEWVANINYPGSSTYYLDSVKGRFTISRDNAKNSLYLQMNSLRAEDTAVYYCARGDYYGTTYWYFDVWGQGTTVTVSS

SEQ ID NO: 2004 - protein, 106 aa, synthetic construct
DIQMTQSPSSLSASVGDRVTITCRASQSISSYLNWYQQKPGKAPKLLIYYTSRLQSGVPSRFSGSGSGTDFTLTISSLQPEDFATYYCQQGRRLWSFGGGTKVEIK

SEQ ID NO: 2005 - protein, 118 aa, synthetic construct
QVQLQQPGAELVKPGASLKLSCKSSGYTFTSYWMHWVRQRPGHGLEWIGEIDPSDSYKDYNQKFKDKATLTVDRSSNTAYMHLSSLTSDDSAVYYCARAITTTPFDFWGQGTTLTVSS

SEQ ID NO: 2006 - protein, 108 aa, synthetic construct
DIVLTQSPATLSVTPGDSVSLSCRASQSISNNLHWYQQKSHESPRLLIKYASQSISGIPSRFSGSGSGTDFTLSINSVETEDFGVYFCQQSNTWPYTFGGGTKLEIKR

SEQ ID NO: 2007 - protein, 119 aa, synthetic construct
EVQLQQSGAELVKPGASVKLSCTASGFNIKDTYVHWVKQRPEQGLEWIGRIDPANGYTKYDPKFQGKATITADTSSNTAYLQLSSLTSEDTAVYYCVRPLYDYYAMDYWGQGTSVTVSS

SEQ ID NO: 2008 - protein, 107 aa, synthetic construct
DILMTQSPSSMSVSLGDTVSITCHASQGISSNIGWLQQKPGKSFMGLIYYGTNLVDGVPSRFSGSGSGADYSLTISSLDSEDFADYYCVQYAQLPYTFGGGTKLEIK

SEQ ID NO: 2009 - protein, 120 aa, synthetic construct
EVQLVESGGGLVQPKGSLKLSCAASGFSFNTYAMNWVRQAPGKGLEWIAHIRSKSNNFATYYADSVKDRFSISRDASENILFLQMNNLKTEDTAMYYCVRQGGDFPMDYWGQGTSVTVSS

SEQ ID NO: 2010 - protein, 106 aa, synthetic construct
QIVLTQSPAIMSASPGEKVTISCSASSSVSYMYWYQQKPGSSPKPWIYRTSNLASGVPARFSGSGSGTSYSLTISNMEAEDAAAYYCQQYHSYPTTFGGGTKLEVK

SEQ ID NO: 2011 - protein, 115 aa, synthetic construct
QVQLQQSGPELVKPGASVKMSCKASGYAFSSSWLNWVRQRPGKGLEWIGRIYPGDGENHYNGKFKGKATLTADKSSSTGYMQLSSLTSEDSAVYFCASYYEGGYWGQGTLITVSA

SEQ ID NO: 2012 - protein, 112 aa, synthetic construct
DIVMTQAAPSIPVTPGESVSISCRSDKSLLHSNGNTYLFWFLQRPGQSPQLLIYRMSNLASGVPDRFSGSGSGTAFTLRISGVEAEDVGVYYCMQHLEYPYTFGGGTKLEIK

SEQ ID NO: 2013 - protein, 124 aa, synthetic construct
EVQLVESGGGLVRPGGSLRLSCAASGFTFSNYDMHWVRQATGKGLEWVSAITAAGDIYYPGSVKGRFTISRENAKNSLYLQMNSLRAGDTAVYYCARGRYSGSGSYYNDWFDPWGQGTLVTVSS

SEQ ID NO: 2014 - protein, 107 aa, synthetic construct
EIVLTQSPATLSLSPGERATLSCRASQSVSSYLAWYQQKPGQAPRLLIYDASNRATGIPARFSGSGSGTDFTLTISSLEPEDFAVYYCQQRSNWPLTFGGGTKVEIK

SEQ ID NO: 2015 - protein, 136 aa, synthetic construct
MDSRLNLVFLVLILKGVQCDVQLVESGGGLVQPGGSRKLSCAASGFTFSSFGMHWVRQAPEKGLEWVAYISSGSSTIYYADTVKGRFTISRDNPKNTLFLQMTSLRSEDTAMYYCARVHYYYFDYWGQGTTLTVSS

SEQ ID NO: 2016 - protein, 123 aa, synthetic construct
MRPSIQFLGLLLFWLHGAQCDIQMTQSPSSLSASLGGKVTITCKASQDINKYIAWYQHKPGKGPRLLIHYTSTLQPGIPSRFSGSGSGRDYSFSISNLEPEDIATYYCLQYDNLWTFGGGTKL

SEQ ID NO: 2017 - protein, 134 aa, synthetic construct
MAWVWTLLFLMAAAQSIQAQIQLVQSGPELKKPGETVKISCKASGYTFTDYSMHWVKQAPGKGLKWMGWINTETGEPTYADDFKGRFAFSLETSASTAYLQINNLKNEDTATYFCARWLLFDYWGQGTTLTVSS

SEQ ID NO: 2018 - protein, 130 aa, synthetic construct
MESQTQVLMFLLLWVSGACADIVMTQSPSSLAMSVGQKVTMSCKSSQSLLNSSNQKNYLAWYQQKPGQSPKLLVYFASTRESGVPDRFIGSGSGTDFTLTISSVQAEDLADYFCQQHYSTPLTFGAGTKL

SEQ ID NO: 2019 - protein, 120 aa, synthetic construct
EVKLEESGGGLVQPGGSMKLSCVASGFTFSYYWMNWVRQSPEKGLEWVAEIRLKSNNYATHYAESVKGRFTISRDDSKNNVYLQMNNLRAEDTGIYYCNRRDEYYAMDYWGQGTSVSVSS

SEQ ID NO: 2020 - protein, 111 aa, synthetic construct
DIVLTQSPGSLAVSLGQRATISCRASESVDNFGISFMNWFQQKPGQPPRLLIYGASNQGSGVPARFSGSGSGTDFSLNIHPVEEDDAAMYFCQQSKEVPWTFGGGTKLEIK

SEQ ID NO: 2021 - protein, 120 aa, synthetic construct
QIQLVQSGPELKKPGETVKISCKASGYTFTNYGMNWVKQAPGKGLKWMGWLNTYTGESIYPDDFKGRFAFSSETSASTAYLQINNLKNEDMATYFCARGDYGYDDPLDYWGQGTSVTVSS

SEQ ID NO: 2022 - protein, 112 aa, synthetic construct
DIVMTQAAPSVPVTPGESVSISCRSSKSLLHTNGNTYLHWFLQRPGQSPQLLIYRMSVLASGVPDRFSGSGSGTAFTLSISRVEAEDVGVFYCMQHLEYPLTFGAGTKLELK

SEQ ID NO: 2023 - protein, 118 aa, synthetic construct
QVHLVESGGGVVQPGRSLRLSCAASGFTFSSYGMHWVRQAPGKGLEWVAVIWYDGSNYYYTDSVKGRFTISRDNSKNTLYLQMNSLRAEDTAVYYCARDLGAAASDYWGQGTLVTVSS

SEQ ID NO: 2024 - protein, 107 aa, synthetic construct
AIQLTQSPSSLSASVGDRVTITCRASQGINSALAWYQQKPGKAPKLLIYDASSLESGVPSRFSGSGSGTDFTLTISSLQPEDFATYYCQQFNSYPHTFGQGTKLEIK

SEQ ID NO: 2025 - protein, 146 aa, synthetic construct
MDLMCKKMKHLWFFLLLVAAPRWVLSQLQLQESGPGLVKPSETLSLTCTVSGGSIISKSSYWGWIRQPPGKGLEWIGSIYYSGSTFYNPSLKSRVTISVDTSKNQFSLKLSSVTAADTAVYYCARLTVAEFDYWGQGTLVTVSSAS

SEQ ID NO: 2026 - protein, 129 aa, synthetic construct
MEAPAQLLFLLLLWLPDTTGEIVLTQSPATLSLSPGERATLSCRASQSVSSFLAWYQQKPGQAPRLLIYDASNRATGIPARFSGSGSGTDFTLTISSLEPEDFAVYYCQQRSNWPLTFGPGTKVDIKRT

SEQ ID NO: 2027 - protein, 146 aa, synthetic construct
MDLMCKKMKHLWFFLLLVAAPRWVLSQLQLQESGPGLVKPSETLSLTCTVSGGSISSRSNYWGWIRQPPGKGLEWIGNVYYRGSTYYNSSLKSRVTISVDTSKNQFSLKLSSVTVADTAVYYCARLSVAEFDYWGQGILVTVSSAS

SEQ ID NO: 2028 - protein, 129 aa, synthetic construct
MEAPAQLLFLLLLWLPDTTGEIVLTQSPATLSLSPGERATLSCRASQSVSSFLAWYQQKPGQAPRLLIYDASNRATGSPARFSGSGSGTDFTLTISSLEPEDFAVYYCQQRSDWPLTFGPGTKVDIKRT

SEQ ID NO: 2029 - protein, 154 aa, synthetic construct
MDLMCKKMKHLWFFLLLVAAPRWVLSQLQLQESGPGLVKPSETLSLTCTVSGGSISSSSYYWGWVRQPPGKGLEWIGSIHYSGSTFYNPSLKSRVTISVDTSKNQFSLKLSSVTAADTTVYYCARQGSTVVRGVYYYGMDVWGQGTTVTVSSAS

SEQ ID NO: 2030 - protein, 131 aa, synthetic construct
METPAQLLFLLLLWLPDTTGEIVLTQSPGTLSLSPGERATLSCRASQSVSSSYLAWYQQKPGQAPRLLIYGASSRATGIPDRFSGSGSGTDFTLTISRLEPEDFAVYYCQQYGSSPLYTFGQGTKLEIKRT

SEQ ID NO: 2031 - protein, 145 aa, synthetic construct
MDWTWRILFLVAAATSAHSQVQLVQSGAEMKKPGASVKVSCKTSGYTFTNYKINWVRQAPGQGLEWMGWMNPDTDSTGYPQKFQGRVTMTRNTSISTAYMELSSLRSEDTAVYYCARSYGSGSYYRDYYYGMDVWGQGTTVTVSS

SEQ ID NO: 2032 - protein, 128 aa, synthetic construct
MEAPAQLLFLLLLWLPDTTGEIVLTQSPATLSLSPGERATLSCRASQSVSSYLAWYQQKPGQAPRLLIYDASNRATGIPARFSGSGSGTDFTLTISSLEPEDFAVYYCQQRSNWPLTFGGGTKVEIKR

SEQ ID NO: 2033 - protein, 139 aa, synthetic construct
MEFGLSWLFLVAILKGVQCEVQLLESGGGLVQPGRSLRLSCAASGFTFSSYAMSWVRQAPGKGLEWVSAISGSGGSRYYADSVKGRFTISRDNSKNTLYLQMNSLRAEDTAVYYCAKESSGWFGAFDYWGQGTLVTVSS

SEQ ID NO: 2034 - protein, 127 aa, synthetic construct
MSPSQLIGFLLLWVPASRGEIVLTQSPDFQSVTPKEKVTITCRASQSIGSSLHWYQQKPDQSPKLLIKYASQSFSGVPSRFSGSGSGTDFTLTINSLEAEDAAAYYCHQSSSLPITFGQGTRLEIKR

SEQ ID NO: 2035 - protein, 123 aa, synthetic construct
EVILVESGGGLVKPGGSLKLSCAASGFTFSSFAMSWVRQTPEKRLEWVATISSGSIYIYYTDGVKGRFTISRDNAKNTVHLQMSSLRSEDTAMYYCARRGIYYGYDGYAMDYWGQGTSVTVSS

SEQ ID NO: 2036 - protein, 112 aa, synthetic construct
AVVMTQTPLSLPVSLGDQASISCRSSQSLVHSNGNTYLHWYMQKPGQSPKVLIYKVSNRFSGVPDRFSGSGSGTDFTLKISRVEADDLGIYFCSQSTHIPLAFGAGTKLELK

SEQ ID NO: 2037-2999 - skipped (963 entries)

SEQ ID NO: 3000 - protein, 107 aa, synthetic construct
DIQMTQSPSFLSASVGDRVTITCSASQGISNYLNWYQQKPGKAVKLLIYYTSSLHSGVPSRFSGSGSGTEYTLTISSLQPEDFATYYCQQYSKLPRTFGGGTKVEIK

SEQ ID NO: 3001 - protein, 107 aa, synthetic construct
DIQMTQSPSSLSASVGDRVTITCSASQGISNYLNWYQQKPGKAVKLLIYYTSSLHSGVPSRFSGSGSGTDYTLTISSLQPEDFATYYCQQYSKLPRTFGGGTKVEIK

SEQ ID NO: 3002 - protein, 107 aa, synthetic construct
DIQMTQSPSSLSASVGDRVTITCSASQGISNYLNWYQQKPGKVVKLLIYYTSSLHSGVPSRFSGSGSGTDYTLTISSLQPEDVATYYCQQYSKLPRTFGGGTKVEIK

SEQ ID NO: 3003 - protein, 107 aa, synthetic construct
DIQMTQSPSSLSASVGDRVTITCSASQGISNYLNWYQQKPGQAVKLLIYYTSSLHSGVPSRFSGSGSGTDYTLTISSLQPEDVATYYCQQYSKLPRTFGGGTKVEIK

SEQ ID NO: 3004 - protein, 107 aa, synthetic construct
DIQMTQSPSSLSASVGDRVTITCSASQGISNYLNWYQQKPGKAVKLLIYYTSSLHSGVPSRFSGSGSGTDYTFTISSLQPEDIATYYCQQYSKLPRTFGGGTKVEIK

SEQ ID NO: 3005 - protein, 107 aa, synthetic construct
DIQMTQSPSSLSASVGDRVTITCSASQGISNYLNWYQQKPGKTVKLLIYYTSSLHSGIPSRFSGSGSGTDYTLTIRSLQPEDFATYYCQQYSKLPRTFGGGTKVEIK

SEQ ID NO: 3006 - protein, 107 aa, synthetic construct
AIQMTQSPSSLSASVGDRVTITCSASQGISNYLNWYQQKPGKAVKLLIYYTSSLHSGVPSRFSGSGSGTDYTLTISSLQPEDFATYYCQQYSKLPRTFGGGTKVEIK

SEQ ID NO: 3007 - protein, 107 aa, synthetic construct
DIQMTQSPSSVSASVGDRVTITCSASQGISNYLNWYQQKPGKAVKLLIYYTSSLHSGVPSRFSGSGSGTDYTLTISSLQPEDFATYYCQQYSKLPRTFGGGTKVEIK

SEQ ID NO: 3008 - protein, 107 aa, synthetic construct
DIQMTQSPSSLSASVGDRVTITCSASQGISNYLNWYQQKPGKAVKRLIYYTSSLHSGVPSRFSGSGSGTEYTLTISNLQPEDFATYYCQQYSKLPRTFGGGTKVEIK

SEQ ID NO: 3009 - protein, 107 aa, synthetic construct
AIRMTQSPFSLSASVGDRVTITCSASQGISNYLNWYQQKPAKAVKLFIYYTSSLHSGVPSRFSGSGSGTDYTLTISSLQPEDFATYYCQQYSKLPRTFGGGTKVEIK

SEQ ID NO: 3010 - protein, 107 aa, synthetic construct
DIQMTQSPSSLSASVGDRVTITCSASQGISNYLNWYQQKPGKAVKRLIYYTSSLHSGVPSRFSGSGSGTEYTLTISSLQPEDFATYYCQQYSKLPRTFGGGTKVEIK

SEQ ID NO: 3011 - protein, 107 aa, synthetic construct
DIQMTQSPSTLSASVGDRVTITCSASQGISNYLNWYQQKPGKAVKLLIYYTSSLHSGVPSRFSGSGSGTEYTLTISSLQPDDFATYYCQQYSKLPRTFGGGTKVEIK

SEQ ID NO: 3012 - protein, 107 aa, synthetic construct
DIQMTQSPSSLSASVGDRVTITCSASQGISNYLNWYQQKPGKAVKSLIYYTSSLHSGVPSRFSGSGSGTDYTLTISSLQPEDFATYYCQQYSKLPRTFGGGTKVEIK

SEQ ID NO: 3013 - protein, 107 aa, synthetic construct
DIQMTQSPSSLSASVGDRVTITCSASQGISNYLNWYQQKPGKAVKSLIYYTSSLHSGVPSKFSGSGSGTDYTLTISSLQPEDFATYYCQQYSKLPRTFGGGTKVEIK

SEQ ID NO: 3014 - protein, 107 aa, synthetic construct
DIQMTQSPSSLSASVGDRVTITCSASQGISNYLNWYQQKPEKAVKSLIYYTSSLHSGVPSRFSGSGSGTDYTLTISSLQPEDFATYYCQQYSKLPRTFGGGTKVEIK

SEQ ID NO: 3015 - protein, 107 aa, synthetic construct
DIQMTQSPSAMSASVGDRVTITCSASQGISNYLNWYQQKPGKVVKRLIYYTSSLHSGVPSRFSGSGSGTEYTLTISSLQPEDFATYYCQQYSKLPRTFGGGTKVEIK

SEQ ID NO: 3016 - protein, 107 aa, synthetic construct
DIVMTQSPDSLAVSLGERATINCSASQGISNYLNWYQQKPGQPVKLLIYYTSSLHSGVPDRFSGSGSGTDYTLTISSLQAEDVAVYYCQQYSKLPRTFGGGTKVEIK

SEQ ID NO: 3017 - protein, 107 aa, synthetic construct
EIVMTQSPGTLSLSPGERATLSCSASQGISNYLNWYQQKPGQAVKLLIYYTSSLHSGIPDRFSGSGSGTDYTLTISRLEPEDFAVYYCQQYSKLPRTFGGGTKVEIK

SEQ ID NO: 3018 - protein, 107 aa, synthetic construct
EIVMTQSPPTLSLSPGERVTLSCSASQGISNYLNWYQQKPGQAVKLLIYYTSSLHSGIPARFSGSGSGTDYTLTISSLQPEDFAVYYCQQYSKLPRTFGGGTKVEIK

SEQ ID NO: 3019 - protein, 107 aa, synthetic construct
EIVMTQSPPTLSLSPGERVTLSCSASQGISNYLNWYQQKPGQAVKLLIYYTSSLHSSIPARFSGSGSGTDYTLTISSLQPEDFAVYYCQQYSKLPRTFGGGTKVEIK

SEQ ID NO: 3020 - protein, 107 aa, synthetic construct
EIVMTQSPATLSLSPGERATLSCSASQGISNYLNWYQQKPGQAVKLLIYYTSSLHSGIPARFSGSGSGTDYTLTISSLEPEDFAVYYCQQYSKLPRTFGGGTKVEIK

SEQ ID NO: 3021 - protein, 107 aa, synthetic construct
EIVMTQSPATLSLSPGERATLSCSASQGISNYLNWYQQKPGQAVKLLIYYTSSLHSGIPARFSGSGSGTDYTLTISRLEPEDFAVYYCQQYSKLPRTFGGGTKVEIK

SEQ ID NO: 3022 - protein, 107 aa, synthetic construct
EIVMTQSPATLSLSPGERATLSCSASQGISNYLNWYQQKPGQAVKLLIYYTSSLHSGIPDRFSGSGSGTDYTLTISRLEPEDFAVYYCQQYSKLPRTFGGGTKVEIK

SEQ ID NO: 3023 - protein, 107 aa, synthetic construct
EIVMTQSPATLSLSPGERATLSCSASQGISNYLNWYQQKPGLAVKLLIYYTSSLHSGIPDRFSGSGSGTDYTLTISRLEPEDFAVYYCQQYSKLPRTFGGGTKVEIK

SEQ ID NO: 3024 - protein, 107 aa, synthetic construct
DIQMIQSPSFLSASVGDRVSIICSASQGISNYLNWYLQKPGKSVKLFIYYTSSLHSGVSSRFSGRGSGTDYTLTIISLKPEDFAAYYCQQYSKLPRTFGGGTKVEIK

SEQ ID NO: 3025 - protein, 107 aa, synthetic construct
EIVMTQSPATLSLSPGERATLSCSASQGISNYLNWYQQKPGQAVKLLIYYTSSLHSGIPARFSGSGSGTDYTLTISSLQPEDFAVYYCQQYSKLPRTFGGGTKVEIK

SEQ ID NO: 3026 - protein, 107 aa, synthetic construct
EIVMTQSPATLSLSPGERATLSCSASQGISNYLNWYQQKPGQAVKLLIYYTSSLHSGIPARFSGSGPGTDYTLTISSLEPEDFAVYYCQQYSKLPRTFGGGTKVEIK

SEQ ID NO: 3027 - protein, 107 aa, synthetic construct
DIVMTQTPLSLSVTPGQPASISCSASQGISNYLNWYLQKPGQSVKLLIYYTSSLHSGVPDRFSGSGSGTDYTLKISRVEAEDVGVYYCQQYSKLPRTFGGGTKVEIK

SEQ ID NO: 3028 - protein, 107 aa, synthetic construct
DIVMTQTPLSLSVTPGQPASISCSASQGISNYLNWYLQKPGQPVKLLIYYTSSLHSGVPDRFSGSGSGTDYTLKISRVEAEDVGVYYCQQYSKLPRTFGGGTKVEIK

SEQ ID NO: 3029 - protein, 107 aa, synthetic construct
DIVMTQSPAFLSVTPGEKVTITCSASQGISNYLNWYQQKPDQAVKLLIYYTSSLHSGVPSRFSGSGSGTDYTFTISSLEAEDAATYYCQQYSKLPRTFGGGTKVEIK

SEQ ID NO: 3030 - protein, 107 aa, synthetic construct
DIVMTQSPLSLPVTPGEPASISCSASQGISNYLNWYLQKPGQSVKLLIYYTSSLHSGVPDRFSGSGSGTDYTLKISRVEAEDVGVYYCQQYSKLPRTFGGGTKVEIK

SEQ ID NO: 3031 - protein, 107 aa, synthetic construct
DIVMTQTPLSLPVTPGEPASISCSASQGISNYLNWYLQKPGQSVKLLIYYTSSLHSGVPDRFSGSGSGTDYTLKISRVEAEDVGVYYCQQYSKLPRTFGGGTKVEIK

SEQ ID NO: 3032 - protein, 107 aa, synthetic construct
EIVMTQSPATLSVSPGERATLSCSASQGISNYLNWYQQKPGQAVKLLIYYTSSLHSGIPARFSGSGSGTEYTLTISILQSEDFAVYYCQQYSKLPRTFGGGTKVEIK

SEQ ID NO: 3033 - protein, 107 aa, synthetic construct
EIVMTQSPATLSVSPGERATLSCSASQGISNYLNWYQQKPGQAVKLLIYYTSSLHSGIPARFSGSGSGTEYTLTISSLQSEDFAVYYCQQYSKLPRTFGGGTKVEIK

SEQ ID NO: 3034 - protein, 107 aa, synthetic construct
DIVMTQSPLSLPVTLGQPASISCSASQGISNYLNWYQQRPGQSVKRLIYYTSSLHSGVPDRFSGSGSGTDYTLKISRVEAEDVGVYYCQQYSKLPRTFGGGTKVEIK

SEQ ID NO: 3035 - protein, 107 aa, synthetic construct
EITMTQSPAFMSATPGDKVNISCSASQGISNYLNWYQQKPGEAVKFIIYYTSSLHSGIPPRFSGSGYGTDYTLTINNIESEDAAYYYCQQYSKLPRTFGGGTKVEIK

SEQ ID NO: 3036 - protein, 107 aa, synthetic construct
DIVMTQTPLSSPVTLGQPASISCSASQGISNYLNWYQQRPGQPVKLLIYYTSSLHSGVPDRFSGSGAGTDYTLKISRVEAEDVGVYYCQQYSKLPRTFGGGTKVEIK

SEQ ID NO: 3037 - protein, 107 aa, synthetic construct
EIVMTQSPDFQSVTPKEKVTITCSASQGISNYLNWYQQKPDQSVKLLIYYTSSLHSGVPSRFSGSGSGTDYTLTINSLEAEDAATYYCQQYSKLPRTFGGGTKVEIK

SEQ ID NO: 3038 - protein, 107 aa, synthetic construct
EIVMTQTPLSLSITPGEQASISCSASQGISNYLNWYLQKARPVVKLLIYYTSSLHSGVPDRFSGSGSGTDYTLKISRVEAEDFGVYYCQQYSKLPRTFGGGTKVEIK

SEQ ID NO: 3039 - protein, 107 aa, synthetic construct
EIVMTQTPLSLSITPGEQASMSCSASQGISNYLNWYLQKARPVVKLLIYYTSSLHSGVPDRFSGSGSGTDYTLKISRVEAEDFGVYYCQQYSKLPRTFGGGTKVEIK

SEQ ID NO: 3040 - protein, 120 aa, synthetic construct
QVTLKESGPVLVKPTETLTLTCTVSGFSLTAYGVNWVRQPPGKALEWLGMIWGDGNTDYNSALKSRLTISKDNSKSQVVLTMTNMDPVDTATYYCARDRVTATLYAMDYWGQGTLVTVSS

SEQ ID NO: 3041 - protein, 120 aa, synthetic construct
QVTLKESGPALVKPTETLTLTCTVSGFSLTAYGVNWVRQPPGKALEWLGMIWGDGNTDYNSALKSRLIISKDNSKSQVVLTMTNMDPVDTATYYCARDRVTATLYAMDYWGQGTLVTVSS

SEQ ID NO: 3042 - protein, 120 aa, synthetic construct
QVTLKESGPALVKPTQTLTLTCTVSGFSLTAYGVNWVRQPPGKALEWLGMIWGDGNTDYNSALKSRLTISKDNSKSQVVLTMTNMDPVDTATYYCARDRVTATLYAMDYWGQGTLVTVSS

SEQ ID NO: 3043 - protein, 120 aa, synthetic construct
QVQLQESGPGLVKPSGTLSLTCAVSGFSLTAYGVNWVRQPPGKGLEWLGMIWGDGNTDYNSALKSRLTISKDNSKSQVSLKLSSVTAADTAVYYCARDRVTATLYAMDYWGQGTLVTVSS

SEQ ID NO: 3044 - protein, 120 aa, synthetic construct
QVTLKESGPTLVKPTQTLTLTCTVSGFSLTAYGVNWVRQPPGKALEWLGMIWGDGNTDYNSALKSRLTITKDNSKSQVVLTMTNMDPVDTATYYCARDRVTATLYAMDYWGQGTLVTVSS

SEQ ID NO: 3045 - protein, 120 aa, synthetic construct
QVTLKESGPALVKPTQTLTLTCTVSGFSLTAYGVNWVRQPPGKALEWLGMIWGDGNTDYNSALKSRLTITKDNSKSQVVLTMTNMDPVDTATYYCARDRVTATLYAMDYWGQGTLVTVSS

SEQ ID NO: 3046 - protein, 120 aa, synthetic construct
QVQLQESGPGLVKPSQTLSLTCTVSGFSLTAYGVNWVRQPPGKGLEWLGMIWGDGNTDYNSALKSRLTISKDNSKSQVSLKLSSVTAADTAVYYCARDRVTATLYAMDYWGQGTLVTVSS

SEQ ID NO: 3047 - protein, 120 aa, synthetic construct
QVQLQESGPGLVKPSETLSLTCTVSGFSLTAYGVNWVRQPPGKGLEWLGMIWGDGNTDYNSALKSRLTISKDNSKSQVSLKLSSVTAADTAVYYCARDRVTATLYAMDYWGQGTLVTVSS

SEQ ID NO: 3048 - protein, 120 aa, synthetic construct
QVQLQESGPGLVKPSQTLSLTCAVSGFSLTAYGVNWVRQPPGKGLEWLGMIWGDGNTDYNSALKSRLTISKDNSKSQVSLKLSSVTAADTAVYYCARDRVTATLYAMDYWGQGTLVTVSS

SEQ ID NO: 3049 - protein, 120 aa, synthetic construct
QVQLQESGPGLVKPSDTLSLTCTVSGFSLTAYGVNWVRQPPGKGLEWLGMIWGDGNTDYNSALKSRLTISKDNSKSQVSLKLSSVTAADTAVYYCARDRVTATLYAMDYWGQGTLVTVSS

SEQ ID NO: 3050 - protein, 120 aa, synthetic construct
QVQLQESGPGLVKPSQTLSLTCTVSGFSLTAYGVNWVRQHPGKGLEWLGMIWGDGNTDYNSALKSRLTISKDNSKSQVSLKLSSVTAADTAVYYCARDRVTATLYAMDYWGQGTLVTVSS

SEQ ID NO: 3051 - protein, 120 aa, synthetic construct
QVQLQESGPGLVKPSQTLSLTCTVSGFSLTAYGVNWVRQPAGKGLEWLGMIWGDGNTDYNSALKSRLTISKDNSKSQVSLKLSSVTAADTAVYYCARDRVTATLYAMDYWGQGTLVTVSS

SEQ ID NO: 3052 - protein, 120 aa, synthetic construct
QVQLQESGPGLVKPSQTLSLTCAVSGFSLTAYGVNWVRQPPGKGLEWLGMIWGDGNTDYNSALKSRLTISKDNSKSQVSLKLSSVTAVDTAVYYCARDRVTATLYAMDYWGQGTLVTVSS

SEQ ID NO: 3053 - protein, 120 aa, synthetic construct
QVQLQESGPGLVKPSETLSLTCTVSGFSLTAYGVNWVRQPPGKGLEWLGMIWGDGNTDYNSALKSRLTISKDNSKSHVSLKLSSVTAADTAVYYCARDRVTATLYAMDYWGQGTLVTVSS

SEQ ID NO: 3054 - protein, 120 aa, synthetic construct
QVQLQESGPGLVKPSETLSLTCAVSGFSLTAYGVNWVRQPPGKGLEWLGMIWGDGNTDYNSALKSRLTISKDNSKSQVSLKLSSVTAADTAVYYCARDRVTATLYAMDYWGQGTLVTVSS

SEQ ID NO: 3055 - protein, 120 aa, synthetic construct
QVQLQESGPGLVKPSQTLSLTCAVYGFSLTAYGVNWVRQPPGKGLEWLGMIWGDGNTDYNSALKSRLTISKDNSKSQVSLKLSSVTAADTAVYYCARDRVTATLYAMDYWGQGTLVTVSS

SEQ ID NO: 3056 - protein, 120 aa, synthetic construct
RVQLQESGPGLVKPSETLSLTCTVSGFSLTAYGVNWVRQPPGKGLEWLGMIWGDGNTDYNSALKSRLTISKDNSKSQVPLKLSSVTAADTAVYYCARDRVTATLYAMDYWGQGTLVTVSS

SEQ ID NO: 3057 - protein, 120 aa, synthetic construct
QVQLQESGPGLVKPSQTLSLTCTVSGFSLTAYGVNWVRQHPGKGLEWLGMIWGDGNTDYNSALKSLLTISKDNSKSQVSLKLSSVTAADTAVYYCARDRVTATLYAMDYWGQGTLVTVSS

SEQ ID NO: 3058 - protein, 120 aa, synthetic construct
QVQLQESGPGLVKPSDTLSLTCAVSGFSLTAYGVNWVRQPPGKGLEWLGMIWGDGNTDYNSALKSRLTISKDNSKSQVSLKLSSVTALDTAVYYCARDRVTATLYAMDYWGQGTLVTVSS

SEQ ID NO: 3059 - protein, 120 aa, synthetic construct
QVQLQESGPGLVKPSDTLSLTCAVSGFSLTAYGVNWVRQPPGKGLEWLGMIWGDGNTDYNSALKSRLTISKDNSKSQVSLKLSSVTAVDTAVYYCARDRVTATLYAMDYWGQGTLVTVSS

SEQ ID NO: 3060 - protein, 120 aa, synthetic construct
QVQLQESGSGLVKPSQTLSLTCAVSGFSLTAYGVNWVRQPPGKGLEWLGMIWGDGNTDYNSALKSRLTISKDNSKSQVSLKLSSVTAADTAVYYCARDRVTATLYAMDYWGQGTLVTVSS

SEQ ID NO: 3061 - protein, 120 aa, synthetic construct
EVQLVESGGGLVQPGRSLRLSCTVSGFSLTAYGVNWVRQAPGKGLEWLGMIWGDGNTDYNSALKSRLTISKDNSKSIVYLQMNSLKTEDTAVYYCARDRVTATLYAMDYWGQGTLVTVSS

SEQ ID NO: 3062 - protein, 120 aa, synthetic construct
EVQLVESGGGLVQPGPSLRLSCTVSGFSLTAYGVNWVRQAPGKGLEWLGMIWGDGNTDYNSALKSRLTISKDNSKSIVYLQMNSLKTEDTAVYYCARDRVTATLYAMDYWGQGTLVTVSS

SEQ ID NO: 3063 - protein, 120 aa, synthetic construct
QVQLQESGSGLVKPSQTLSLTCAVSGFSLTAYGVNWVRQSPGKGLEWLGMIWGDGNTDYNSALKSRLTISKDNSKSQVSLKLSSVTAADTAVYYCARDRVTATLYAMDYWGQGTLVTVSS

SEQ ID NO: 3064 - protein, 120 aa, synthetic construct
QVQLQESGPGLVKPSETLSLTCTVSGFSLTAYGVNWVRQPAGKGLEWLGMIWGDGNTDYNSALKSRLTISKDNSKSQVSLKLSSVTAADTAVYYCARDRVTATLYAMDYWGQGTLVTVSS

SEQ ID NO: 3065 - protein, 120 aa, synthetic construct
EVQLVESGGGLVKPGRSLRLSCTVSGFSLTAYGVNWVRQAPGKGLEWLGMIWGDGNTDYNSALKSRLTISKDNSKSIVYLQMNSLKTEDTAVYYCARDRVTATLYAMDYWGQGTLVTVSS

SEQ ID NO: 3066 - protein, 120 aa, synthetic construct
QVQLQESGPGLVKPSETLSLTCAVYGFSLTAYGVNWVRQPPGKGLEWLGMIWGDGNTDYNSALKSRLTISKDNSKSQVYLKLSSVTAADTAVYYCARDRVTATLYAMDYWGQGTLVTVSS

SEQ ID NO: 3067 - protein, 120 aa, synthetic construct
QVQLQESGPGLVKPSDTLSLTCAVSGFSLTAYGVNWVRQPPGKGLEWLGMIWGDGNTDYNSALKSRLTISKDNSKSQVSLKLSSVTAVDTGVYYCARDRVTATLYAMDYWGQGTLVTVSS

SEQ ID NO: 3068 - protein, 120 aa, synthetic construct
EVQLVESGGGLVQPGGSLRLSCAVSGFSLTAYGVNWVRQAPGKGLEWLGMIWGDGNTDYNSALKSRLTISKDNSKSSVYLQMNSLKTEDTAVYYCARDRVTATLYAMDYWGQGTLVTVSS

SEQ ID NO: 3069 - protein, 120 aa, synthetic construct
EVQLVESGGGLVKPGGSLRLSCAVSGFSLTAYGVNWVRQAPGKGLEWLGMIWGDGNTDYNSALKSRLTISKDNSKSTVYLQMNSLKTEDTAVYYCARDRVTATLYAMDYWGQGTLVTVSS

SEQ ID NO: 3070 - protein, 120 aa, synthetic construct
QVQLQQSGPGLVKPSQTLSLTCAVSGFSLTAYGVNWVRQSPSRGLEWLGMIWGDGNTDYNSALKSRLTINKDNSKSQVSLQLNSVTPEDTAVYYCARDRVTATLYAMDYWGQGTLVTVSS

SEQ ID NO: 3071 - protein, 120 aa, synthetic construct
QVQLVESGGGLVQPGGSLRLSCSVSGFSLTAYGVNWVRQAPGKGLEWLGMIWGDGNTDYNSALKSRLTISKDNSKSTVYLQMNSLRAEDTAVYYCARDRVTATLYAMDYWGQGTLVTVSS

SEQ ID NO: 3072 - protein, 120 aa, synthetic construct
QVQLQQWGAGLLKPSETLSLTCAVYGFSLTAYGVNWVRQPPGKGLEWLGMIWGDGNTDYNSALKSRLTISKDNSKSQVSLKLSSVTAADTAVYYCARDRVTATLYAMDYWGQGTLVTVSS

SEQ ID NO: 3073 - protein, 120 aa, synthetic construct
QVQLVESGGGVVQPGRSLRLSCAVSGFSLTAYGVNWVRQAPGKGLEWLGMIWGDGNTDYNSALKSRLTISKDNSTSTVFLQMNSLRAEDTAVYYCARDRVTATLYAMDYWGQGTLVTVSS

SEQ ID NO: 3074 - protein, 120 aa, synthetic construct
EVQLVESGGGLVQPGGSLRLSCAVSGFSLTAYGVNWVRQAPGKGLEWLGMIWGDGNTDYNSALKSRLTISKDNSKSTVYLQMNSLRAEDTAVYYCARDRVTATLYAMDYWGQGTLVTVSS

SEQ ID NO: 3075 - protein, 120 aa, synthetic construct
EVQLVESGGGLVQPGGSLRLSCAVSGFSLTAYGVNWVRQAPGKGLEWLGMIWGDGNTDYNSALKSRLTISKDNAKSSVYLQMNSLRDEDTAVYYCARDRVTATLYAMDYWGQGTLVTVSS

SEQ ID NO: 3076 - protein, 120 aa, synthetic construct
EVQLLESGGGLVQPGGSLRLSCAVSGFSLTAYGVNWVRQAPGKGLEWLGMIWGDGNTDYNSALKSRLTISKDNSKSTVYLQMNSLRAEDTAVYYCARDRVTATLYAMDYWGQGTLVTVSS

SEQ ID NO: 3077 - protein, 120 aa, synthetic construct
QVQLVESGGGLVKPGGSLRLSCAVSGFSLTAYGVNWVRQAPGKGLEWLGMIWGDGNTDYNSALKSRLTISKDNAKSSVYLQMNSLRAEDTAVYYCARDRVTATLYAMDYWGQGTLVTVSS

SEQ ID NO: 3078 - protein, 120 aa, synthetic construct
EVQLVESGGGLVQPGGSLKLSCAVSGFSLTAYGVNWVRQASGKGLEWLGMIWGDGNTDYNSALKSRLTISKDNSKSTVYLQMNSLKTEDTAVYYCARDRVTATLYAMDYWGQGTLVTVSS

SEQ ID NO: 3079 - protein, 120 aa, synthetic construct
QVQLLESGGGLVKPGGSLRLSCAVSGFSLTAYGVNWVRQAPGKGLEWLGMIWGDGNTDYNSALKSRLTISKDNAKSSVYLQMNSLRAEDTAVYYCARDRVTATLYAMDYWGQGTLVTVSS

SEQ ID NO: 3080 - protein, 120 aa, synthetic construct
QVQLVESGGGVVQPGRSLRLSCAVSGFSLTAYGVNWVRQAPGKGLEWLGMIWGDGNTDYNSALKSRLTISKDNSKSTVYLQMNSLRAEDTAVYYCARDRVTATLYAMDYWGQGTLVTVSS

SEQ ID NO: 3081 - protein, 120 aa, synthetic construct
QVQLVESGGGVVQPGRSLRLSCAVSGFSLTAYGVNWVRQAPGKGLEWLGMIWGDGNTDYNSALKSRLTISKDNSKSRVYLQMNSLRAEDTAVYYCARDRVTATLYAMDYWGQGTLVTVSS

SEQ ID NO: 3082 - protein, 120 aa, synthetic construct
QVQLVESGGGVVQPGRSLRLSCAVSGFSLTAYGVNWVRQAPGKGLEWLGMIWGDGNTDYNSALKSRLAISKDNSKSTVYLQMNSLRAEDTAVYYCARDRVTATLYAMDYWGQGTLVTVSS

SEQ ID NO: 3083 - protein, 120 aa, synthetic construct
QVQLVESGGGVVQPGGSLRLSCAVSGFSLTAYGVNWVRQAPGKGLEWLGMIWGDGNTDYNSALKSRLTISKDNSKSTVYLQMNSLRAEDTAVYYCARDRVTATLYAMDYWGQGTLVTVSS

SEQ ID NO: 3084 - protein, 120 aa, synthetic construct
EVQLVESGGGLVQPGGSLRLSCAVSGFSLTAYGVNWVRQAPGKGLEWLGMIWGDGNTDYNSALKSRLTISKDNAKSTVYLQMNSLRAEDTAVYYCARDRVTATLYAMDYWGQGTLVTVSS

SEQ ID NO: 3085 - protein, 120 aa, synthetic construct
EVQLVESGGGLVQPGGSLRLSCAVSGFSLTAYGVNWVRQAPGKGLEWLGMIWGDGNTDYNSALKSRLTISKDNAKSSVYLQMNSLRAEDTAVYYCARDRVTATLYAMDYWGQGTLVTVSS

SEQ ID NO: 3086 - protein, 120 aa, synthetic construct
EVQLVESGGVVVQPGGSLRLSCAVSGFSLTAYGVNWVRQAPGKGLEWLGMIWGDGNTDYNSALKSRLTISKDNSKSSVYLQMNSLRTEDTALYYCARDRVTATLYAMDYWGQGTLVTVSS

SEQ ID NO: 3087 - protein, 120 aa, synthetic construct
EVQLVESGGGLVQPGGSLRLSCAVSGFSLTAYGVNWVRQAPGKGLEWLGMIWGDGNTDYNSALKSRLTISKHNSKSTVYLQMNSLRAEDTAVYYCARDRVTATLYAMDYWGQGTLVTVSS

SEQ ID NO: 3088 - protein, 120 aa, synthetic construct
EVQLVESGGGLVKPGGSLRLSCAVSGFSLTAYGVNWVRQAPGKGLEWLGMIWGDGNTDYNSALKSRLTISKDNAKSSVYLQMNSLRAEDTAVYYCARDRVTATLYAMDYWGQGTLVTVSS

SEQ ID NO: 3089 - protein, 120 aa, synthetic construct
EVQLVESGGGLIQPGGSLRLSCAVSGFSLTAYGVNWVRQPPGKGLEWLGMIWGDGNTDYNSALKSRLTISKDNSKSTVYLQMNSLRAEDTAVYYCARDRVTATLYAMDYWGQGTLVTVSS

SEQ ID NO: 3090 - skipped

SEQ ID NO: 3091 - protein, 119 aa, synthetic construct
QVQLQQSGPELVKPGASVKISCKASGYAFSSSWMNWVKQRPGQGLEWIGRIYPGDGDTKYNGKFKGKATLTADKSSSTAYMHLSSLTSVDSAVYFCARRGTGGWYFDVWGAGTTVTVSS

SEQ ID NO: 3092 - protein, 111 aa, synthetic construct
DIVLTQSPASLAVSLGQRATISCRASESVDSSGNSFMHWYQQKPGQPPQLLIYRASNLESGIPARFSGSGSRTDFTLTINPVEADDVATFYCQQSFDDPFTFGSGTKLEIK

SEQ ID NO: 3093 - protein, 111 aa, synthetic construct
DIVLTQSPDSLAVSLGERATINCRASESVDSSGNSFMHWYQQKPGQPPQLLIYRASNLESGVPDRFSGSGSRTDFTLTISSLQAEDVAVYYCQQSFDDPFTFGQGTKLEIK

SEQ ID NO: 3094 - protein, 111 aa, synthetic construct
EIVLTQSPATLSLSPGERATLSCRASESVDSSGNSFMHWYQQKPGQAPQLLIYRASNLESGIPARFSGSGSRTDFTLTISSLEPEDFAVYYCQQSFDDPFTFGQGTKLEIK

SEQ ID NO: 3095 - protein, 111 aa, synthetic construct
EIVLTQSPATLSLSPGERATLSCRASESVDSSGNSFMHWYQQKPGQAPQLLIYRASNLESGIPARFSGSGSRTDFTLTISRLEPEDFAVYYCQQSFDDPFTFGQGTKLEIK

SEQ ID NO: 3096 - protein, 111 aa, synthetic construct
EIVLTQSPATLSLSPGERATLSCRASESVDSSGNSFMHWYQQKPGQAPQLLIYRASNLESGIPARFSGSGSRTDFTLTISSLQPEDFAVYYCQQSFDDPFTFGQGTKLEIK

SEQ ID NO: 3097 - protein, 111 aa, synthetic construct
DIQLTQSPSSLSASVGDRVTITCRASESVDSSGNSFMHWYQQKPGQAPQLLIYRASNLESGVPSRFSGSGSRTDFTLTISSLQPEDVATYYCQQSFDDPFTFGQGTKLEIK

SEQ ID NO: 3098 - protein, 111 aa, synthetic construct
EIVLTQSPATLSLSPGERATLSCRASESVDSSGNSFMHWYQQKPGQAPQLLIYRASNLESGIPARFSGSGPRTDFTLTISSLEPEDFAVYYCQQSFDDPFTFGQGTKLEIK

SEQ ID NO: 3099 - protein, 111 aa, synthetic construct
EIVLTQSPATLSLSPGERATLSCRASESVDSSGNSFMHWYQQKPGQAPQLLIYRASNLESGIPDRFSGSGSRTDFTLTISRLEPEDFAVYYCQQSFDDPFTFGQGTKLEIK

SEQ ID NO: 3100 - protein, 111 aa, synthetic construct
DIQLTQSPSSLSASVGDRVTITCRASESVDSSGNSFMHWYQQKPGKVPQLLIYRASNLESGVPSRFSGSGSRTDFTLTISSLQPEDVATYYCQQSFDDPFTFGQGTKLEIK

SEQ ID NO: 3101 - protein, 111 aa, synthetic construct
DIQLTQSPSSLSASVGDRVTITCRASESVDSSGNSFMHWYQQKPGKTPQLLIYRASNLESGIPSRFSGSGSRTDFTLTIRSLQPEDFATYYCQQSFDDPFTFGQGTKLEIK

SEQ ID NO: 3102 - protein, 111 aa, synthetic construct
EIVLTQSPGTLSLSPGERATLSCRASESVDSSGNSFMHWYQQKPGQAPQLLIYRASNLESGIPDRFSGSGSRTDFTLTISRLEPEDFAVYYCQQSFDDPFTFGQGTKLEIK

SEQ ID NO: 3103 - protein, 111 aa, synthetic construct
EIVLTQSPATLSLSPGERATLSCRASESVDSSGNSFMHWYQQKPGLAPQLLIYRASNLESGIPDRFSGSGSRTDFTLTISRLEPEDFAVYYCQQSFDDPFTFGQGTKLEIK

SEQ ID NO: 3104 - protein, 111 aa, synthetic construct
DIQLTQSPSSLSASVGDRVTITCRASESVDSSGNSFMHWYQQKPGKAPQLLIYRASNLESGVPSRFSGSGSRTDFTLTISSLQPEDFATYYCQQSFDDPFTFGQGTKLEIK

SEQ ID NO: 3105 - protein, 111 aa, synthetic construct
DIQLTQSPSSVSASVGDRVTITCRASESVDSSGNSFMHWYQQKPGKAPQLLIYRASNLESGVPSRFSGSGSRTDFTLTISSLQPEDFATYYCQQSFDDPFTFGQGTKLEIK

SEQ ID NO: 3106 - protein, 111 aa, synthetic construct
AIQLTQSPSSLSASVGDRVTITCRASESVDSSGNSFMHWYQQKPGKAPQLLIYRASNLESGVPSRFSGSGSRTDFTLTISSLQPEDFATYYCQQSFDDPFTFGQGTKLEIK

SEQ ID NO: 3107 - protein, 111 aa, synthetic construct
DIQLTQSPSFLSASVGDRVTITCRASESVDSSGNSFMHWYQQKPGKAPQLLIYRASNLESGVPSRFSGSGSRTEFTLTISSLQPEDFATYYCQQSFDDPFTFGQGTKLEIK

SEQ ID NO: 3108 - protein, 111 aa, synthetic construct
DIQLTQSPSSLSASVGDRVTITCRASESVDSSGNSFMHWYQQKPGKAPQLLIYRASNLESGVPSRFSGSGSRTDFTFTISSLQPEDIATYYCQQSFDDPFTFGQGTKLEIK

SEQ ID NO: 3109 - protein, 111 aa, synthetic construct
EIVLTQSPATLSVSPGERATLSCRASESVDSSGNSFMHWYQQKPGQAPQLLIYRASNLESGIPARFSGSGSRTEFTLTISILQSEDFAVYYCQQSFDDPFTFGQGTKLEIK

SEQ ID NO: 3110 - protein, 111 aa, synthetic construct
EIVLTQSPATLSVSPGERATLSCRASESVDSSGNSFMHWYQQKPGQAPQLLIYRASNLESGIPARFSGSGSRTEFTLTISSLQSEDFAVYYCQQSFDDPFTFGQGTKLEIK

SEQ ID NO: 3111 - protein, 111 aa, synthetic construct
AIRLTQSPFSLSASVGDRVTITCRASESVDSSGNSFMHWYQQKPAKAPQLFIYRASNLESGVPSRFSGSGSRTDFTLTISSLQPEDFATYYCQQSFDDPFTFGQGTKLEIK

SEQ ID NO: 3112 - protein, 111 aa, synthetic construct
DIQLTQSPSSLSASVGDRVTITCRASESVDSSGNSFMHWYQQKPGKAPQSLIYRASNLESGVPSRFSGSGSRTDFTLTISSLQPEDFATYYCQQSFDDPFTFGQGTKLEIK

SEQ ID NO: 3113 - protein, 111 aa, synthetic construct
DIQLTQSPSSLSASVGDRVTITCRASESVDSSGNSFMHWYQQKPGKAPQRLIYRASNLESGVPSRFSGSGSRTEFTLTISNLQPEDFATYYCQQSFDDPFTFGQGTKLEIK

SEQ ID NO: 3114 - protein, 111 aa, synthetic construct
DIQLTQSPSTLSASVGDRVTITCRASESVDSSGNSFMHWYQQKPGKAPQLLIYRASNLESGVPSRFSGSGSRTEFTLTISSLQPDDFATYYCQQSFDDPFTFGQGTKLEIK

SEQ ID NO: 3115 - protein, 111 aa, synthetic construct
EIVLTQSPDFQSVTPKEKVTITCRASESVDSSGNSFMHWYQQKPDQSPQLLIYRASNLESGVPSRFSGSGSRTDFTLTINSLEAEDAATYYCQQSFDDPFTFGQGTKLEIK

SEQ ID NO: 3116 - protein, 111 aa, synthetic construct
DIQLTQSPSSLSASVGDRVTITCRASESVDSSGNSFMHWYQQKPGKAPQSLIYRASNLESGVPSKFSGSGSRTDFTLTISSLQPEDFATYYCQQSFDDPFTFGQGTKLEIK

SEQ ID NO: 3117 - protein, 111 aa, synthetic construct
DIQLTQSPSSLSASVGDRVTITCRASESVDSSGNSFMHWYQQKPGKAPQRLIYRASNLESGVPSRFSGSGSRTEFTLTISSLQPEDFATYYCQQSFDDPFTFGQGTKLEIK

SEQ ID NO: 3118 - protein, 111 aa, synthetic construct
DIVLTQTPLSLSVTPGQPASISCRASESVDSSGNSFMHWYLQKPGQPPQLLIYRASNLESGVPDRFSGSGSRTDFTLKISRVEAEDVGVYYCQQSFDDPFTFGQGTKLEIK

SEQ ID NO: 3119 - protein, 111 aa, synthetic construct
DIQLTQSPSSLSASVGDRVTITCRASESVDSSGNSFMHWYQQKPEKAPQSLIYRASNLESGVPSRFSGSGSRTDFTLTISSLQPEDFATYYCQQSFDDPFTFGQGTKLEIK

SEQ ID NO: 3120 - protein, 111 aa, synthetic construct
EIVLTQSPPTLSLSPGERVTLSCRASESVDSSGNSFMHWYQQKPGQAPQLLIYRASNLESGIPARFSGSGSRTDFTLTISSLQPEDFAVYYCQQSFDDPFTFGQGTKLEIK

SEQ ID NO: 3121 - protein, 111 aa, synthetic construct
DIQLTQSPSAMSASVGDRVTITCRASESVDSSGNSFMHWYQQKPGKVPQRLIYRASNLESGVPSRFSGSGSRTEFTLTISSLQPEDFATYYCQQSFDDPFTFGQGTKLEIK

SEQ ID NO: 3122 - protein, 111 aa, synthetic construct
DIVLTQSPLSLPVTPGEPASISCRASESVDSSGNSFMHWYLQKPGQSPQLLIYRASNLESGVPDRFSGSGSRTDFTLKISRVEAEDVGVYYCQQSFDDPFTFGQGTKLEIK

SEQ ID NO: 3123 - protein, 111 aa, synthetic construct
DIVLTQTPLSLPVTPGEPASISCRASESVDSSGNSFMHWYLQKPGQSPQLLIYRASNLESGVPDRFSGSGSRTDFTLKISRVEAEDVGVYYCQQSFDDPFTFGQGTKLEIK

SEQ ID NO: 3124 - protein, 111 aa, synthetic construct
DIVLTQTPLSLSVTPGQPASISCRASESVDSSGNSFMHWYLQKPGQSPQLLIYRASNLESGVPDRFSGSGSRTDFTLKISRVEAEDVGVYYCQQSFDDPFTFGQGTKLEIK

SEQ ID NO: 3125 - protein, 111 aa, synthetic construct
EIVLTQSPPTLSLSPGERVTLSCRASESVDSSGNSFMHWYQQKPGQAPQLLIYRASNLESSIPARFSGSGSRTDFTLTISSLQPEDFAVYYCQQSFDDPFTFGQGTKLEIK

SEQ ID NO: 3126 - protein, 111 aa, synthetic construct
DIVLTQSPLSLPVTLGQPASISCRASESVDSSGNSFMHWYQQRPGQSPQRLIYRASNLESGVPDRFSGSGSRTDFTLKISRVEAEDVGVYYCQQSFDDPFTFGQGTKLEIK

SEQ ID NO: 3127 - protein, 111 aa, synthetic construct
DIVLTQTPLSSPVTLGQPASISCRASESVDSSGNSFMHWYQQRPGQPPQLLIYRASNLESGVPDRFSGSGARTDFTLKISRVEAEDVGVYYCQQSFDDPFTFGQGTKLEIK

SEQ ID NO: 3128 - protein, 111 aa, synthetic construct
DIVLTQSPAFLSVTPGEKVTITCRASESVDSSGNSFMHWYQQKPDQAPQLLIYRASNLESGVPSRFSGSGSRTDFTFTISSLEAEDAATYYCQQSFDDPFTFGQGTKLEIK

SEQ ID NO: 3129 - protein, 111 aa, synthetic construct
DIQLIQSPSFLSASVGDRVSIICRASESVDSSGNSFMHWYLQKPGKSPQLFIYRASNLESGVSSRFSGRGSRTDFTLTIISLKPEDFAAYYCQQSFDDPFTFGQGTKLEIK

SEQ ID NO: 3130 - protein, 111 aa, synthetic construct
EIVLTQTPLSLSITPGEQASISCRASESVDSSGNSFMHWYLQKARPVPQLLIYRASNLESGVPDRFSGSGSRTDFTLKISRVEAEDFGVYYCQQSFDDPFTFGQGTKLEIK

SEQ ID NO: 3131 - protein, 111 aa, synthetic construct
EIVLTQTPLSLSITPGEQASMSCRASESVDSSGNSFMHWYLQKARPVPQLLIYRASNLESGVPDRFSGSGSRTDFTLKISRVEAEDFGVYYCQQSFDDPFTFGQGTKLEIK

SEQ ID NO: 3132 - protein, 111 aa, synthetic construct
EITLTQSPAFMSATPGDKVNISCRASESVDSSGNSFMHWYQQKPGEAPQFIIYRASNLESGIPPRFSGSGYRTDFTLTINNIESEDAAYYYCQQSFDDPFTFGQGTKLEIK

SEQ ID NO: 3133 - protein, 119 aa, synthetic construct
QVQLVQSGAEVKKPGASVKVSCKASGYAFSSSWMNWVRQAPGQGLEWIGRIYPGDGDTKYNGKFKGRATLTADKSTSTAYMELSSLRSEDTAVYYCARRGTGGWYFDVWGQGTTVTVSS

SEQ ID NO: 3134 - protein, 119 aa, synthetic construct
QVQLVQSGAEVKKPGSSVKVSCKASGYAFSSSWMNWVRQAPGQGLEWIGRIYPGDGDTKYNGKFKGRATLTADKSTSTAYMELSSLRSEDTAVYYCARRGTGGWYFDVWGQGTTVTVSS

SEQ ID NO: 3135 - protein, 119 aa, synthetic construct
QVQLVQSGAEVKKPGASVKVSCKASGYAFSSSWMNWVRQAPGKGLEWIGRIYPGDGDTKYNGKFKGRATLTADKSTSTAYMELSSLRSEDTAVYYCARRGTGGWYFDVWGQGTTVTVSS

SEQ ID NO: 3136 - protein, 119 aa, synthetic construct
QVQLVQSGAEVKKPGASVKVSCKASGYAFSSSWMNWVRQAPGQELEWIGRIYPGDGDTKYNGKFKGRATLTADKSISTAYMELSSLRSEDTATYYCARRGTGGWYFDVWGQGTTVTVSS

SEQ ID NO: 3137 - protein, 119 aa, synthetic construct
EVQLVQSGAEVKKPGATVKISCKASGYAFSSSWMNWVQQAPGKGLEWIGRIYPGDGDTKYNGKFKGRATLTADKSTSTAYMELSSLRSEDTAVYYCARRGTGGWYFDVWGQGTTVTVSS

SEQ ID NO: 3138 - protein, 119 aa, synthetic construct
QVQLVQSGAEVKKTGSSVKVSCKASGYAFSSSWMNWVRQAPGQALEWIGRIYPGDGDTKYNGKFKGRATLTADKSMSTAYMELSSLRSEDTAMYYCARRGTGGWYFDVWGQGTTVTVSS

SEQ ID NO: 3139 - protein, 119 aa, synthetic construct
QVQLVQSGAEVKKPGASVKVSCKASGYAFSSSWMNWVRQAPGQRLEWIGRIYPGDGDTKYNGKFKGRATLTADKSASTAYMELSSLRSEDMAVYYCARRGTGGWYFDVWGQGTTVTVSS

SEQ ID NO: 3140 - protein, 119 aa, synthetic construct
QVQLVQSGAEVKKPGASVKVSCKASGYAFSSSWMNWVRQAPGQGLEWIGRIYPGDGDTKYNGKFKGRATLTADKSTSTAYMELRSLRSDDMAVYYCARRGTGGWYFDVWGQGTTVTVSS

SEQ ID NO: 3141 - protein, 119 aa, synthetic construct
QVQLVQSGAEVKKPGASVKVSCKASGYAFSSSWMNWVRQAPGQRLEWIGRIYPGDGDTKYNGKFKGRATLTADKSASTAYMELSSLRSEDTAVYYCARRGTGGWYFDVWGQGTTVTVSS

SEQ ID NO: 3142 - protein, 119 aa, synthetic construct
QVQLVQSGAEVKKPGASVKVSCKASGYAFSSSWMNWVRQAPGQGLEWIGRIYPGDGDTKYNGKFKGRATLTADKSTSTAYMELRSLRSDDTAVYYCARRGTGGWYFDVWGQGTTVTVSS

SEQ ID NO: 3143 - protein, 119 aa, synthetic construct
QVQLVQSGAEVKKPGASVKVSCKASGYAFSSSWMNWVRQAPGQGLEWIGRIYPGDGDTKYNGKFKGRATLTADKSISTAYMELSRLRSDDTAVYYCARRGTGGWYFDVWGQGTTVTVSS

SEQ ID NO: 3144 - protein, 119 aa, synthetic construct
QVQLVQSGAEVKKPGASVKVSCKASGYAFSSSWMNWVRQAPGQGLEWIGRIYPGDGDTKYNGKFKGRATLTADKSISTAYMELSRLRSDDTVVYYCARRGTGGWYFDVWGQGTTVTVSS

SEQ ID NO: 3145 - protein, 119 aa, synthetic construct
QVQLVQSGAEVKKPGASVKVSCKASGYAFSSSWMNWVRQAPGQGLEWIGRIYPGDGDTKYNGKFKGWATLTADKSISTAYMELSRLRSDDTAVYYCARRGTGGWYFDVWGQGTTVTVSS

SEQ ID NO: 3146 - protein, 119 aa, synthetic construct
QVQLVQSGAEVKKPGASVKVSCKASGYAFSSSWMNWVRQATGQGLEWIGRIYPGDGDTKYNGKFKGRATLTANKSISTAYMELSSLRSEDTAVYYCARRGTGGWYFDVWGQGTTVTVSS

SEQ ID NO: 3147 - protein, 119 aa, synthetic construct
QVQLVQSGSELKKPGASVKVSCKASGYAFSSSWMNWVRQAPGQGLEWIGRIYPGDGDTKYNGKFKGRAVLSADKSVSTAYLQISSLKAEDTAVYYCARRGTGGWYFDVWGQGTTVTVSS

SEQ ID NO: 3148 - protein, 119 aa, synthetic construct
QVQLVQSGPEVKKPGTSVKVSCKASGYAFSSSWMNWVRQARGQRLEWIGRIYPGDGDTKYNGKFKGRATLTADKSTSTAYMELSSLRSEDTAVYYCARRGTGGWYFDVWGQGTTVTVSS

SEQ ID NO: 3149 - protein, 119 aa, synthetic construct
EVQLVQSGAEVKKPGESLKISCKASGYAFSSSWMNWVRQMPGKGLEWIGRIYPGDGDTKYNGKFKGQATLSADKSISTAYLQWSSLKASDTAMYYCARRGTGGWYFDVWGQGTTVTVSS

SEQ ID NO: 3150 - protein, 119 aa, synthetic construct
QVQLVQSGSELKKPGASVKVSCKASGYAFSSSWMNWVRQAPGQGLEWIGRIYPGDGDTKYNGKFKGRAVLSADKSVSMAYLQISSLKAEDTAVYYCARRGTGGWYFDVWGQGTTVTVSS

SEQ ID NO: 3151 - protein, 119 aa, synthetic construct
QVQLVQSGHEVKQPGASVKVSCKASGYAFSSSWMNWVPQAPGQGLEWIGRIYPGDGDTKYNGKFKGRAVLSADKSASTAYLQISSLKAEDMAMYYCARRGTGGWYFDVWGQGTTVTVSS

SEQ ID NO: 3152 - protein, 119 aa, synthetic construct
EVQLVQSGAEVKKPGESLKISCKASGYAFSSSWMNWVRQMPGKGLEWIGRIYPGDGDTKYNGKFKGQATLSADKPISTAYLQWSSLKASDTAMYYCARRGTGGWYFDVWGQGTTVTVSS

SEQ ID NO: 3153 - protein, 119 aa, synthetic construct
EVQLVQSGAEVKKPGESLRISCKASGYAFSSSWMNWVRQMPGKGLEWIGRIYPGDGDTKYNGKFKGQATLSADKSISTAYLQWSSLKASDTAMYYCARRGTGGWYFDVWGQGTTVTVSS

SEQ ID NO: 3154 - protein, 119 aa, synthetic construct
EVQLVQSGAEVKKPGESLRISCKASGYAFSSSWMNWVRQMPGKGLEWIGRIYPGDGDTKYNGKFKGHATLSADKSISTAYLQWSSLKASDTAMYYCARRGTGGWYFDVWGQGTTVTVSS

SEQ ID NO: 3155 - protein, 119 aa, synthetic construct
QVQLVQSGAEVKKTGSSVKVSCKASGYAFSSSWMNWVRQAPRQALEWIGRIYPGDGDTKYNGKFKGRATLTADKSMSTAYMELSSLRSEDTAMYYCARRGTGGWYFDVWGQGTTVTVSS

SEQ ID NO: 3156 - protein, 119 aa, synthetic construct
EVQLVESGGGLVQPGRSLRLSCTASGYAFSSSWMNWVRQAPGKGLEWIGRIYPGDGDTKYNGKFKGRATLSADKSKSIAYLQMNSLKTEDTAVYYCARRGTGGWYFDVWGQGTTVTVSS

SEQ ID NO: 3157 - protein, 119 aa, synthetic construct
EVQLVESGGGLVQPGPSLRLSCTASGYAFSSSWMNWVRQAPGKGLEWIGRIYPGDGDTKYNGKFKGRATLSADKSKSIAYLQMNSLKTEDTAVYYCARRGTGGWYFDVWGQGTTVTVSS

SEQ ID NO: 3158 - protein, 119 aa, synthetic construct
QVQLQESGPGLVKPSQTLSLTCTASGYAFSSSWMNWVRQPPGKGLEWIGRIYPGDGDTKYNGKFKGRATLSADKSKSQASLKLSSVTAADTAVYYCARRGTGGWYFDVWGQGTTVTVSS

SEQ ID NO: 3159 - protein, 119 aa, synthetic construct
QVQLQESGPGLVKPSGTLSLTCAASGYAFSSSWMNWVRQPPGKGLEWIGRIYPGDGDTKYNGKFKGRATLSADKSKSQASLKLSSVTAADTAVYYCARRGTGGWYFDVWGQGTTVTVSS

SEQ ID NO: 3160 - protein, 119 aa, synthetic construct
EVQLVESGGGLVKPGRSLRLSCTASGYAFSSSWMNWVRQAPGKGLEWIGRIYPGDGDTKYNGKFKGRATLSADKSKSIAYLQMNSLKTEDTAVYYCARRGTGGWYFDVWGQGTTVTVSS

SEQ ID NO: 3161 - protein, 119 aa, synthetic construct
EVQLVESGGGLVQPGGSLKLSCAASGYAFSSSWMNWVRQASGKGLEWIGRIYPGDGDTKYNGKFKGRATLSADKSKSTAYLQMNSLKTEDTAVYYCARRGTGGWYFDVWGQGTTVTVSS

SEQ ID NO: 3162 - protein, 119 aa, synthetic construct
QVQLQESGPGLVKPSQTLSLTCAASGYAFSSSWMNWVRQPPGKGLEWIGRIYPGDGDTKYNGKFKGRATLSADKSKSQASLKLSSVTAADTAVYYCARRGTGGWYFDVWGQGTTVTVSS

SEQ ID NO: 3163 - protein, 119 aa, synthetic construct
EVQLVESGGGLVKPGGSLRLSCAASGYAFSSSWMNWVRQAPGKGLEWIGRIYPGDGDTKYNGKFKGRATLSADKSKSTAYLQMNSLKTEDTAVYYCARRGTGGWYFDVWGQGTTVTVSS

SEQ ID NO: 3164 - protein, 119 aa, synthetic construct
EVQLVESGGALVKPGGSLRLSCAASGYAFSSSWMNWVRQAPGKGLEWIGRIYPGDGDTKYNGKFKGRATLSADKSKSTAYLQMNSLKTEDTAVYYCARRGTGGWYFDVWGQGTTVTVSS

SEQ ID NO: 3165 - protein, 119 aa, synthetic construct
QVQLQESGPGLVKPSQTLSLTCAAYGYAFSSSWMNWVRQPPGKGLEWIGRIYPGDGDTKYNGKFKGRATLSADKSKSQASLKLSSVTAADTAVYYCARRGTGGWYFDVWGQGTTVTVSS

SEQ ID NO: 3166 - protein, 119 aa, synthetic construct
QVQLQESGSGLVKPSQTLSLTCAASGYAFSSSWMNWVRQPPGKGLEWIGRIYPGDGDTKYNGKFKGRATLSADKSKSQASLKLSSVTAADTAVYYCARRGTGGWYFDVWGQGTTVTVSS

SEQ ID NO: 3167 - protein, 119 aa, synthetic construct
EVQLVESGGGLVQPGGSLRLSCAASGYAFSSSWMNWVRQAPGKGLEWIGRIYPGDGDTKYNGKFKGRATLSADKSKSSAYLQMNSLKTEDTAVYYCARRGTGGWYFDVWGQGTTVTVSS

SEQ ID NO: 3168 - protein, 119 aa, synthetic construct
QVQLQESGPGLVKPSDTLSLTCTASGYAFSSSWMNWVRQPPGKGLEWIGRIYPGDGDTKYNGKFKGRATLSADKSKSQASLKLSSVTAADTAVYYCARRGTGGWYFDVWGQGTTVTVSS

SEQ ID NO: 3169 - protein, 119 aa, synthetic construct
QVQLQESGPGLVKPSQTLSLTCTASGYAFSSSWMNWVRQHPGKGLEWIGRIYPGDGDTKYNGKFKGRATLSADKSKSQASLKLSSVTAADTAVYYCARRGTGGWYFDVWGQGTTVTVSS

SEQ ID NO: 3170 - protein, 119 aa, synthetic construct
QVQLQESGPGLVKPSQTLSLTCTASGYAFSSSWMNWVRQHPGKGLEWIGRIYPGDGDTKYNGKFKGLATLSADKSKSQASLKLSSVTAADTAVYYCARRGTGGWYFDVWGQGTTVTVSS

SEQ ID NO: 3171 - protein, 119 aa, synthetic construct
QVQLVESGGGVVQPGRSLRLSCAASGYAFSSSWMNWVRQAPGKGLEWIGRIYPGDGDTKYNGKFKGRATLSADKSKSTAYLQMSSLRAEDTAVYYCARRGTGGWYFDVWGQGTTVTVSS

SEQ ID NO: 3172 - protein, 119 aa, synthetic construct
QVQLVESGGGLVKPGGSLRLSCAASGYAFSSSWMNWVRQAPGKGLEWIGRIYPGDGDTKYNGKFKGRATLSADKAKSSAYLQMNSLRAEDTAVYYCARRGTGGWYFDVWGQGTTVTVSS

SEQ ID NO: 3173 - protein, 119 aa, synthetic construct
QVQLVESGGGLVQPGGSLRLSCSASGYAFSSSWMNWVRQAPGKGLEWIGRIYPGDGDTKYNGKFKGRATLSADKSKSTAYLQMNSLRAEDTAVYYCARRGTGGWYFDVWGQGTTVTVSS

SEQ ID NO: 3174 - protein, 119 aa, synthetic construct
QVQLLESGGGLVKPGGSLRLSCAASGYAFSSSWMNWVRQAPGKGLEWIGRIYPGDGDTKYNGKFKGRATLSADKAKSSAYLQMNSLRAEDTAVYYCARRGTGGWYFDVWGQGTTVTVSS

SEQ ID NO: 3175 - protein, 119 aa, synthetic construct
EVQLVESGGGLVQPGGSLRLSCSASGYAFSSSWMNWVRQAPGKGLEWIGRIYPGDGDTKYNGKFKGRATLSADKSKSTAYLQMSSLRAEDTAVYYCARRGTGGWYFDVWGQGTTVTVSS

SEQ ID NO: 3176 - protein, 119 aa, synthetic construct
QVQLQESGPGLVKPSDTLSLTCAASGYAFSSSWMNWVRQPPGKGLEWIGRIYPGDGDTKYNGKFKGRATLSADKSKSQASLKLSSVTAVDTAVYYCARRGTGGWYFDVWGQGTTVTVSS

SEQ ID NO: 3177 - protein, 119 aa, synthetic construct
QVQLQESGPGLVKPSQTLSLTCAASGYAFSSSWMNWVRQPPGKGLEWIGRIYPGDGDTKYNGKFKGRATLSADKSKSQASLKLSSVTAVDTAVYYCARRGTGGWYFDVWGQGTTVTVSS

SEQ ID NO: 3178 - protein, 119 aa, synthetic construct
EVQLVESGGGLVQPGGSLRLSCSASGYAFSSSWMNWVRQAPGKGLEWIGRIYPGDGDTKYNGKFKGRATLSADKSKSTAYVQMSSLRAEDTAVYYCARRGTGGWYFDVWGQGTTVTVSS

SEQ ID NO: 3179 - protein, 119 aa, synthetic construct
QVQLVDSGGGVVQPGRSLRLSCAASGYAFSSSWMNWVRQAPGKGLEWIGRIYPGDGDTKYNGKFKGRATLSADKSKSTAYLQMNSLRAEDTAVYYCARRGTGGWYFDVWGQGTTVTVSS

SEQ ID NO: 3180 - protein, 119 aa, synthetic construct
QVQLVESGGGVVQPGRSLRLSCAASGYAFSSSWMNWVRQAPGKGLEWIGRIYPGDGDTKYNGKFKGRATLSADKSKSTAYLQMNSLRAEGTAVYYCARRGTGGWYFDVWGQGTTVTVSS

SEQ ID NO: 3181 - protein, 119 aa, synthetic construct
QVQLVESGGGVVQPGRSLRLSCAASGYAFSSSWMNWVRQAPGKGLEWIGRIYPGDGDTKYNGKFKGRATLSADKSKSTAYLQMNSLRAEDTAVYYCARRGTGGWYFDVWGQGTTVTVSS

SEQ ID NO: 3182 - protein, 119 aa, synthetic construct
EVQLVESGGGLVQPGGSLRLSCAASGYAFSSSWMNWVRQAPGKGLEWIGRIYPGDGDTKYNGKFKGRATLSADKSKSTAYLQMNSLRAEDTAVYYCARRGTGGWYFDVWGQGTTVTVSS

SEQ ID NO: 3183 - protein, 117 aa, synthetic construct
EVQLVESGGDLVKPGGSLKLSCAVSGFTFRSYGMSWVRQTPDKRLEWVALISSGGSYTYYTDSVKGRFTISRDNAKNTLYLQMSSLKSEDTAIYYCSRHGGNFFDYWGQGTTLTVSS

SEQ ID NO: 3184 - protein, 107 aa, synthetic construct
QIVLTQSPSIMSASPGEKVTMTCSVSSSVSYMHWYQQKSGTSPKRWIYDTSKLASGVPARFSGSGSGTSYSLTISSMEAEDAATYYCQQWSSNPQYTFGGGTKLEIK

SEQ ID NO: 3185 - protein, 107 aa, synthetic construct
DIVLTQSPAFLSVTPGEKVTITCSVSSSVSYMHWYQQKPDQAPKLLIYDTSKLASGVPSRFSGSGSGTDYTFTISSLEAEDAATYYCQQWSSNPQYTFGQGTKLEIK

SEQ ID NO: 3186 - protein, 107 aa, synthetic construct
AIQLTQSPSSLSASVGDRVTITCSVSSSVSYMHWYQQKPGKAPKLLIYDTSKLASGVPSRFSGSGSGTDYTLTISSLQPEDFATYYCQQWSSNPQYTFGQGTKLEIK

SEQ ID NO: 3187 - protein, 107 aa, synthetic construct
DIQLTQSPSFLSASVGDRVTITCSVSSSVSYMHWYQQKPGKAPKLLIYDTSKLASGVPSRFSGSGSGTEYTLTISSLQPEDFATYYCQQWSSNPQYTFGQGTKLEIK

SEQ ID NO: 3188 - protein, 107 aa, synthetic construct
DIQLTQSPSSLSASVGDRVTITCSVSSSVSYMHWYQQKPGKAPKLLIYDTSKLASGVPSRFSGSGSGTDYTLTISSLQPEDFATYYCQQWSSNPQYTFGQGTKLEIK

SEQ ID NO: 3189 - protein, 107 aa, synthetic construct
DIQLTQSPSSVSASVGDRVTITCSVSSSVSYMHWYQQKPGKAPKLLIYDTSKLASGVPSRFSGSGSGTDYTLTISSLQPEDFATYYCQQWSSNPQYTFGQGTKLEIK

SEQ ID NO: 3190 - protein, 107 aa, synthetic construct
DIQLTQSPSSLSASVGDRVTITCSVSSSVSYMHWYQQKPGKVPKLLIYDTSKLASGVPSRFSGSGSGTDYTLTISSLQPEDVATYYCQQWSSNPQYTFGQGTKLEIK

SEQ ID NO: 3191 - protein, 107 aa, synthetic construct
DIQLTQSPSSLSASVGDRVTITCSVSSSVSYMHWYQQKPGQAPKLLIYDTSKLASGVPSRFSGSGSGTDYTLTISSLQPEDVATYYCQQWSSNPQYTFGQGTKLEIK

SEQ ID NO: 3192 - protein, 107 aa, synthetic construct
EIVLTQSPDFQSVTPKEKVTITCSVSSSVSYMHWYQQKPDQSPKLLIYDTSKLASGVPSRFSGSGSGTDYTLTINSLEAEDAATYYCQQWSSNPQYTFGQGTKLEIK

SEQ ID NO: 3193 - protein, 107 aa, synthetic construct
AIRLTQSPFSLSASVGDRVTITCSVSSSVSYMHWYQQKPAKAPKLFIYDTSKLASGVPSRFSGSGSGTDYTLTISSLQPEDFATYYCQQWSSNPQYTFGQGTKLEIK

SEQ ID NO: 3194 - protein, 107 aa, synthetic construct
DIQLTQSPSSLSASVGDRVTITCSVSSSVSYMHWYQQKPGKAPKLLIYDTSKLASGVPSRFSGSGSGTDYTFTISSLQPEDIATYYCQQWSSNPQYTFGQGTKLEIK

SEQ ID NO: 3195 - protein, 107 aa, synthetic construct
EIVLTQSPATLSLSPGERATLSCSVSSSVSYMHWYQQKPGQAPKLLIYDTSKLASGIPARFSGSGSGTDYTLTISSLEPEDFAVYYCQQWSSNPQYTFGQGTKLEIK

SEQ ID NO: 3196 - protein, 107 aa, synthetic construct
DIQLTQSPSTLSASVGDRVTITCSVSSSVSYMHWYQQKPGKAPKLLIYDTSKLASGVPSRFSGSGSGTEYTLTISSLQPDDFATYYCQQWSSNPQYTFGQGTKLEIK

SEQ ID NO: 3197 - protein, 107 aa, synthetic construct
DIQLTQSPSSLSASVGDRVTITCSVSSSVSYMHWYQQKPGKTPKLLIYDTSKLASGIPSRFSGSGSGTDYTLTIRSLQPEDFATYYCQQWSSNPQYTFGQGTKLEIK

SEQ ID NO: 3198 - protein, 107 aa, synthetic construct
EIVLTQSPPTLSLSPGERVTLSCSVSSSVSYMHWYQQKPGQAPKLLIYDTSKLASGIPARFSGSGSGTDYTLTISSLQPEDFAVYYCQQWSSNPQYTFGQGTKLEIK

SEQ ID NO: 3199 - protein, 107 aa, synthetic construct
DIQLTQSPSSLSASVGDRVTITCSVSSSVSYMHWYQQKPGKAPKRLIYDTSKLASGVPSRFSGSGSGTEYTLTISSLQPEDFATYYCQQWSSNPQYTFGQGTKLEIK

SEQ ID NO: 3200 - protein, 107 aa, synthetic construct
EIVLTQSPATLSLSPGERATLSCSVSSSVSYMHWYQQKPGQAPKLLIYDTSKLASGIPARFSGSGPGTDYTLTISSLEPEDFAVYYCQQWSSNPQYTFGQGTKLEIK

SEQ ID NO: 3201 - protein, 107 aa, synthetic construct
EIVLTQSPATLSLSPGERATLSCSVSSSVSYMHWYQQKPGQAPKLLIYDTSKLASGIPARFSGSGSGTDYTLTISRLEPEDFAVYYCQQWSSNPQYTFGQGTKLEIK

SEQ ID NO: 3202 - protein, 107 aa, synthetic construct
EIVLTQSPATLSLSPGERATLSCSVSSSVSYMHWYQQKPGQAPKLLIYDTSKLASGIPARFSGSGSGTDYTLTISSLQPEDFAVYYCQQWSSNPQYTFGQGTKLEIK

SEQ ID NO: 3203 - protein, 107 aa, synthetic construct
EIVLTQSPATLSVSPGERATLSCSVSSSVSYMHWYQQKPGQAPKLLIYDTSKLASGIPARFSGSGSGTEYTLTISSLQSEDFAVYYCQQWSSNPQYTFGQGTKLEIK

SEQ ID NO: 3204 - protein, 107 aa, synthetic construct
EIVLTQSPATLSVSPGERATLSCSVSSSVSYMHWYQQKPGQAPKLLIYDTSKLASGIPARFSGSGSGTEYTLTISILQSEDFAVYYCQQWSSNPQYTFGQGTKLEIK

SEQ ID NO: 3205 - protein, 107 aa, synthetic construct
EIVLTQSPPTLSLSPGERVTLSCSVSSSVSYMHWYQQKPGQAPKLLIYDTSKLASSIPARFSGSGSGTDYTLTISSLQPEDFAVYYCQQWSSNPQYTFGQGTKLEIK

SEQ ID NO: 3206 - protein, 107 aa, synthetic construct
DIQLTQSPSSLSASVGDRVTITCSVSSSVSYMHWYQQKPGKAPKSLIYDTSKLASGVPSRFSGSGSGTDYTLTISSLQPEDFATYYCQQWSSNPQYTFGQGTKLEIK

SEQ ID NO: 3207 - protein, 107 aa, synthetic construct
DIQLTQSPSSLSASVGDRVTITCSVSSSVSYMHWYQQKPGKAPKRLIYDTSKLASGVPSRFSGSGSGTEYTLTISNLQPEDFATYYCQQWSSNPQYTFGQGTKLEIK

SEQ ID NO: 3208 - protein, 107 aa, synthetic construct
DIQLTQSPSAMSASVGDRVTITCSVSSSVSYMHWYQQKPGKVPKRLIYDTSKLASGVPSRFSGSGSGTEYTLTISSLQPEDFATYYCQQWSSNPQYTFGQGTKLEIK

SEQ ID NO: 3209 - protein, 107 aa, synthetic construct
EIVLTQSPATLSLSPGERATLSCSVSSSVSYMHWYQQKPGQAPKLLIYDTSKLASGIPDRFSGSGSGTDYTLTISRLEPEDFAVYYCQQWSSNPQYTFGQGTKLEIK

SEQ ID NO: 3210 - protein, 107 aa, synthetic construct
EIVLTQSPATLSLSPGERATLSCSVSSSVSYMHWYQQKPGLAPKLLIYDTSKLASGIPDRFSGSGSGTDYTLTISRLEPEDFAVYYCQQWSSNPQYTFGQGTKLEIK

SEQ ID NO: 3211 - protein, 107 aa, synthetic construct
EIVLTQSPGTLSLSPGERATLSCSVSSSVSYMHWYQQKPGQAPKLLIYDTSKLASGIPDRFSGSGSGTDYTLTISRLEPEDFAVYYCQQWSSNPQYTFGQGTKLEIK

SEQ ID NO: 3212 - protein, 107 aa, synthetic construct
DIQLTQSPSSLSASVGDRVTITCSVSSSVSYMHWYQQKPGKAPKSLIYDTSKLASGVPSKFSGSGSGTDYTLTISSLQPEDFATYYCQQWSSNPQYTFGQGTKLEIK

SEQ ID NO: 3213 - protein, 107 aa, synthetic construct
DIQLTQSPSSLSASVGDRVTITCSVSSSVSYMHWYQQKPEKAPKSLIYDTSKLASGVPSRFSGSGSGTDYTLTISSLQPEDFATYYCQQWSSNPQYTFGQGTKLEIK

SEQ ID NO: 3214 - protein, 107 aa, synthetic construct
DIVLTQSPDSLAVSLGERATINCSVSSSVSYMHWYQQKPGQPPKLLIYDTSKLASGVPDRFSGSGSGTDYTLTISSLQAEDVAVYYCQQWSSNPQYTFGQGTKLEIK

SEQ ID NO: 3215 - protein, 107 aa, synthetic construct
EIVLTQTPLSLSITPGEQASMSCSVSSSVSYMHWYLQKARPVPKLLIYDTSKLASGVPDRFSGSGSGTDYTLKISRVEAEDFGVYYCQQWSSNPQYTFGQGTKLEIK

SEQ ID NO: 3216 - protein, 107 aa, synthetic construct
EIVLTQTPLSLSITPGEQASISCSVSSSVSYMHWYLQKARPVPKLLIYDTSKLASGVPDRFSGSGSGTDYTLKISRVEAEDFGVYYCQQWSSNPQYTFGQGTKLEIK

SEQ ID NO: 3217 - protein, 107 aa, synthetic construct
DIVLTQSPLSLPVTPGEPASISCSVSSSVSYMHWYLQKPGQSPKLLIYDTSKLASGVPDRFSGSGSGTDYTLKISRVEAEDVGVYYCQQWSSNPQYTFGQGTKLEIK

SEQ ID NO: 3218 - protein, 107 aa, synthetic construct
DIVLTQSPLSLPVTLGQPASISCSVSSSVSYMHWYQQRPGQSPKRLIYDTSKLASGVPDRFSGSGSGTDYTLKISRVEAEDVGVYYCQQWSSNPQYTFGQGTKLEIK

SEQ ID NO: 3219 - protein, 107 aa, synthetic construct
DIVLTQTPLSLPVTPGEPASISCSVSSSVSYMHWYLQKPGQSPKLLIYDTSKLASGVPDRFSGSGSGTDYTLKISRVEAEDVGVYYCQQWSSNPQYTFGQGTKLEIK

SEQ ID NO: 3220 - protein, 107 aa, synthetic construct
DIVLTQTPLSLSVTPGQPASISCSVSSSVSYMHWYLQKPGQSPKLLIYDTSKLASGVPDRFSGSGSGTDYTLKISRVEAEDVGVYYCQQWSSNPQYTFGQGTKLEIK

SEQ ID NO: 3221 - protein, 107 aa, synthetic construct
DIVLTQTPLSLSVTPGQPASISCSVSSSVSYMHWYLQKPGQPPKLLIYDTSKLASGVPDRFSGSGSGTDYTLKISRVEAEDVGVYYCQQWSSNPQYTFGQGTKLEIK

SEQ ID NO: 3222 - protein, 107 aa, synthetic construct
DIQLIQSPSFLSASVGDRVSIICSVSSSVSYMHWYLQKPGKSPKLFIYDTSKLASGVSSRFSGRGSGTDYTLTIISLKPEDFAAYYCQQWSSNPQYTFGQGTKLEIK

SEQ ID NO: 3223 - protein, 107 aa, synthetic construct
DIVLTQTPLSSPVTLGQPASISCSVSSSVSYMHWYQQRPGQPPKLLIYDTSKLASGVPDRFSGSGAGTDYTLKISRVEAEDVGVYYCQQWSSNPQYTFGQGTKLEIK

SEQ ID NO: 3224 - protein, 107 aa, synthetic construct
EITLTQSPAFMSATPGDKVNISCSVSSSVSYMHWYQQKPGEAPKFIIYDTSKLASGIPPRFSGSGYGTDYTLTINNIESEDAAYYYCQQWSSNPQYTFGQGTKLEIK

SEQ ID NO: 3225 - protein, 117 aa, synthetic construct
EVQLVESGGGLVKPGGSLRLSCAVSGFTFRSYGMSWVRQAPGKGLEWVALISSGGSYTYYTDSVKGRFTISRDNSKNTLYLQMNSLKTEDTAVYYCSRHGGNFFDYWGQGTTVTVSS

SEQ ID NO: 3226 - protein, 117 aa, synthetic construct
EVQLVESGGALVKPGGSLRLSCAVSGFTFRSYGMSWVRQAPGKGLEWVALISSGGSYTYYTDSVKGRFTISRDNSKNTLYLQMNSLKTEDTAVYYCSRHGGNFFDYWGQGTTVTVSS

SEQ ID NO: 3227 - protein, 117 aa, synthetic construct
EVQLVESGGGLVQPGGSLRLSCAVSGFTFRSYGMSWVRQAPGKGLEWVALISSGGSYTYYTDSVKGRFTISRDNAKNTLYLQMNSLRAEDTAVYYCSRHGGNFFDYWGQGTTVTVSS

SEQ ID NO: 3228 - protein, 117 aa, synthetic construct
EVQLVESGGGLVQPGGSLRLSCAVSGFTFRSYGMSWVRQAPGKGLEWVALISSGGSYTYYTDSVKGRFTISRDNAKNSLYLQMNSLRAEDTAVYYCSRHGGNFFDYWGQGTTVTVSS

SEQ ID NO: 3229 - protein, 117 aa, synthetic construct
EVQLVESGGGLVQPGGSLRLSCAVSGFTFRSYGMSWVRQAPGKGLEWVALISSGGSYTYYTDSVKGRFTISRDNSKNSLYLQMNSLKTEDTAVYYCSRHGGNFFDYWGQGTTVTVSS

SEQ ID NO: 3230 - protein, 117 aa, synthetic construct
EVQLVESGGGLVQPGGSLRLSCAVSGFTFRSYGMSWVRQAPGKGLEWVALISSGGSYTYYTDSVKGRFTISRDNAKNSLYLQMNSLRAEDMAVYYCSRHGGNFFDYWGQGTTVTVSS

SEQ ID NO: 3231 - protein, 117 aa, synthetic construct
EVQLVESGGGLVQPGGSLRLSCAVSGFTFRSYGMSWVRQAPGKGLEWVALISSGGSYTYYTDSVKGQFTISRDNAKNTLYLQMNSLRAEDMAVYYCSRHGGNFFDYWGQGTTVTVSS

SEQ ID NO: 3232 - protein, 117 aa, synthetic construct
EVQLVESGGGLVKPGRSLRLSCTVSGFTFRSYGMSWVRQAPGKGLEWVALISSGGSYTYYTDSVKGRFTISRDNSKNILYLQMNSLKTEDTAVYYCSRHGGNFFDYWGQGTTVTVSS

SEQ ID NO: 3233 - protein, 117 aa, synthetic construct
EVQLVESGGGLVKPGGSLRLSCAVSGFTFRSYGMSWVRQAPGKGLEWVALISSGGSYTYYTDSVKGRFTISRDNAKNSLYLQMNSLRAEDTAVYYCSRHGGNFFDYWGQGTTVTVSS

SEQ ID NO: 3234 - protein, 117 aa, synthetic construct
EVQLVESGGGLVQPGGSLKLSCAVSGFTFRSYGMSWVRQASGKGLEWVALISSGGSYTYYTDSVKGRFTISRDNSKNTLYLQMNSLKTEDTAVYYCSRHGGNFFDYWGQGTTVTVSS

SEQ ID NO: 3235 - protein, 117 aa, synthetic construct
QVQLVESGGGVVQPGGSLRLSCAVSGFTFRSYGMSWVRQAPGKGLEWVALISSGGSYTYYTDSVKGRFTISRDNSKNTLYLQMNSLRAEDTAVYYCSRHGGNFFDYWGQGTTVTVSS

SEQ ID NO: 3236 - protein, 117 aa, synthetic construct
QVQLVESGGGVVQPGRSLRLSCAVSGFTFRSYGMSWVRQAPGKGLEWVALISSGGSYTYYTDSVKGRFTISRDNSKNTLYLQMSSLRAEDTAVYYCSRHGGNFFDYWGQGTTVTVSS

SEQ ID NO: 3237 - protein, 117 aa, synthetic construct
EVQLVESGGGLVQPGGSLRLSCPVSGFTFRSYGMSWVRQAPGKGLEWVALISSGGSYTYYTDSVKGRFTISRDNANNSLYLQMNSLRAEDTAVYYCSRHGGNFFDYWGQGTTVTVSS

SEQ ID NO: 3238 - protein, 117 aa, synthetic construct
EVQLVESGGGLVQPGRSLRLSCTVSGFTFRSYGMSWVRQAPGKGLEWVALISSGGSYTYYTDSVKGRFTISRDNSKNILYLQMNSLKTEDTAVYYCSRHGGNFFDYWGQGTTVTVSS

SEQ ID NO: 3239 - protein, 117 aa, synthetic construct
EVQLVESGGGLVQPGPSLRLSCTVSGFTFRSYGMSWVRQAPGKGLEWVALISSGGSYTYYTDSVKGRFTISRDNSKNILYLQMNSLKTEDTAVYYCSRHGGNFFDYWGQGTTVTVSS

SEQ ID NO: 3240 - protein, 117 aa, synthetic construct
EVQLVESGGGLVQPGGSLRLSCAVSGFTFRSYGMSWVRQAPGKGLEWVALISSGGSYTYYTDSVKGRFTISRDNSKNTLYLQMNSLRAEDTAVYYCSRHGGNFFDYWGQGTTVTVSS

SEQ ID NO: 3241 - protein, 117 aa, synthetic construct
EVQLVESGGGLVQPGGSLRLSCAVSGFTFRSYGMSWVRQAPGKGLEWVALISSGGSYTYYTDSVKGRFTISRDNAKNSLYLQMNSLRDEDTAVYYCSRHGGNFFDYWGQGTTVTVSS

SEQ ID NO: 3242 - protein, 117 aa, synthetic construct
QVQLVESGGGLVKPGGSLRLSCAVSGFTFRSYGMSWVRQAPGKGLEWVALISSGGSYTYYTDSVKGRFTISRDNAKNSLYLQMNSLRAEDTAVYYCSRHGGNFFDYWGQGTTVTVSS

SEQ ID NO: 3243 - protein, 117 aa, synthetic construct
QVQLVESGGGVVQPGRSLRLSCAVSGFTFRSYGMSWVRQAPGKGLEWVALISSGGSYTYYTDSVKGRFTISRDNSKNTLYLQMNSLRAEDTAVYYCSRHGGNFFDYWGQGTTVTVSS

SEQ ID NO: 3244 - protein, 117 aa, synthetic construct
EVQLLESGGGLVQPGGSLRLSCAVSGFTFRSYGMSWVRQAPGKGLEWVALISSGGSYTYYTDSVKGRFTISRDNSKNTLYLQMNSLRAEDTAVYYCSRHGGNFFDYWGQGTTVTVSS

SEQ ID NO: 3245 - protein, 117 aa, synthetic construct
EVQLVESGGGLVQPGGSLRLSCAVSGFTFRSYGMSWVRQAPGKGLEWVALISSGGSYTYYTDSVKGRFTISRHNSKNTLYLQMNSLRAEDTAVYYCSRHGGNFFDYWGQGTTVTVSS

SEQ ID NO: 3246 - protein, 117 aa, synthetic construct
EVQLVESGGGLIQPGGSLRLSCAVSGFTFRSYGMSWVRQPPGKGLEWVALISSGGSYTYYTDSVKGRFTISRDNSKNTLYLQMNSLRAEDTAVYYCSRHGGNFFDYWGQGTTVTVSS

SEQ ID NO: 3247 - protein, 117 aa, synthetic construct
EVQLVESGGGLIQPGGSLRLSCAVSGFTFRSYGMSWVRQAPGKGLEWVALISSGGSYTYYTDSVKGRFTISRDNSKNTLYLQMNSLRAEDTAVYYCSRHGGNFFDYWGQGTTVTVSS

SEQ ID NO: 3248 - protein, 117 aa, synthetic construct
EVQLVESGGGLVQPGRSLRLSCAVSGFTFRSYGMSWVRQAPGKGLEWVALISSGGSYTYYTDSVKGRFTISRDNAKNSLYLQMNSLRAEDTALYYCSRHGGNFFDYWGQGTTVTVSS

SEQ ID NO: 3249 - protein, 117 aa, synthetic construct
QVQLVESGGGVVQPGRSLRLSCAVSGFTFRSYGMSWVRQAPGKGLEWVALISSGGSYTYYTDSVKGRFTISRDNSKNRLYLQMNSLRAEDTAVYYCSRHGGNFFDYWGQGTTVTVSS

SEQ ID NO: 3250 - protein, 117 aa, synthetic construct
QVQLVESGGGVVQPGRSLRLSCAVSGFTFRSYGMSWVRQAPGKGLEWVALISSGGSYTYYTDSVKGRFTISRDNSKNTLYLQMNSLRAEGTAVYYCSRHGGNFFDYWGQGTTVTVSS

SEQ ID NO: 3251 - protein, 117 aa, synthetic construct
QVQLVESGGGVVQPGRSLRLSCAVSGFTFRSYGMSWVRQAPGKGLEWVALISSGGSYTYYTDSVKGRFAISRDNSKNTLYLQMNSLRAEDTAVYYCSRHGGNFFDYWGQGTTVTVSS

SEQ ID NO: 3252 - protein, 117 aa, synthetic construct
QVQLVDSGGGVVQPGRSLRLSCAVSGFTFRSYGMSWVRQAPGKGLEWVALISSGGSYTYYTDSVKGRFTISRDNSKNTLYLQMNSLRAEDTAVYYCSRHGGNFFDYWGQGTTVTVSS

SEQ ID NO: 3253 - protein, 117 aa, synthetic construct
EVQLVESGGGVVRPGGSLRLSCAVSGFTFRSYGMSWVRQAPGKGLEWVALISSGGSYTYYTDSVKGRFTISRDNAKNSLYLQMNSLRAEDTALYHCSRHGGNFFDYWGQGTTVTVSS

SEQ ID NO: 3254 - protein, 117 aa, synthetic construct
EVQLVESGGVVVQPGGSLRLSCAVSGFTFRSYGMSWVRQAPGKGLEWVALISSGGSYTYYTDSVKGRFTISRDNSKNSLYLQMNSLRAEDTALYYCSRHGGNFFDYWGQGTTVTVSS

SEQ ID NO: 3255 - protein, 117 aa, synthetic construct
EVQLVESGGGVVQPGGSLRLSCAVSGFTFRSYGMSWVRQAPGKGLEWVALISSGGSYTYYTDSVKGRFTISRDNSKNSLYLQMNSLRTEDTALYYCSRHGGNFFDYWGQGTTVTVSS

SEQ ID NO: 3256 - protein, 117 aa, synthetic construct
EVQLVESGGVVVQPGGSLRLSCAVSGFTFRSYGMSWVRQAPGKGLEWVALISSGGSYTYYTDSVKGRFTISRDNSKNSLYLQMNSLRTEDTALYYCSRHGGNFFDYWGQGTTVTVSS

SEQ ID NO: 3257 - protein, 117 aa, synthetic construct
EVQLVETGGGLIQPGGSLRLSCAVSGFTFRSYGMSWVRQAPGKGLEWVALISSGGSYTYYTDSVKGRFTISRDNSKNTLYLQMNSLRAEDTAVYYCSRHGGNFFDYWGQGTTVTVSS

SEQ ID NO: 3258 - protein, 117 aa, synthetic construct
EVQLVESGGGLVQPGGSLRLSCAVSGFTFRSYGMSWVRQATGKGLEWVALISSGGSYTYYTDSVKGRFTISRENAKNSLYLQMNSLRAGDTAVYYCSRHGGNFFDYWGQGTTVTVSS

SEQ ID NO: 3259 - protein, 117 aa, synthetic construct
EVQLVESRGVLVQPGGSLRLSCAVSGFTFRSYGMSWVRQAPGKGLEWVALISSGGSYTYYTDSVKGRFTISRDNSKNTLHLQMNSLRAEDTAVYYCSRHGGNFFDYWGQGTTVTVSS

SEQ ID NO: 3260 - protein, 117 aa, synthetic construct
EVQLVESGGGLVQPGRSLRLSCAVSGFTFRSYGMSWVRQAPGKGLEWVALISSGGSYTYYTDSVKGRFTISRDNAKNSLYLQMNSLRAEDMALYYCSRHGGNFFDYWGQGTTVTVSS

SEQ ID NO: 3261 - protein, 117 aa, synthetic construct
QVQLVESGGGLVQPGGSLRLSCSVSGFTFRSYGMSWVRQAPGKGLEWVALISSGGSYTYYTDSVKGRFTISRDNSKNTLYLQMNSLRAEDTAVYYCSRHGGNFFDYWGQGTTVTVSS

SEQ ID NO: 3262 - protein, 117 aa, synthetic construct
EVQLVESGGGLVQPGGSLRLSCSVSGFTFRSYGMSWVRQAPGKGLEWVALISSGGSYTYYTDSVKGRFTISRDNSKNTLYLQMSSLRAEDTAVYYCSRHGGNFFDYWGQGTTVTVSS

SEQ ID NO: 3263 - protein, 117 aa, synthetic construct
QVQLVESGGGVVQPGRSLRLSCAVSGFTFRSYGMSWVRQAPGKGLEWVALISSGGSYTYYTDSVKGRFTISRDNSTNTLFLQMNSLRAEDTAVYYCSRHGGNFFDYWGQGTTVTVSS

SEQ ID NO: 3264 - protein, 117 aa, synthetic construct
QVQLLESGGGLVKPGGSLRLSCAVSGFTFRSYGMSWVRQAPGKGLEWVALISSGGSYTYYTDSVKGRFTISRDNAKNSLYLQMNSLRAEDTAVYYCSRHGGNFFDYWGQGTTVTVSS

SEQ ID NO: 3265 - protein, 117 aa, synthetic construct
EVQLVESGEGLVQPGGSLRLSCAVSGFTFRSYGMSWVRQAPGKGLEWVALISSGGSYTYYTDSVKGRFTISRDNSKNTLYLQMGSLRAEDMAVYYCSRHGGNFFDYWGQGTTVTVSS

SEQ ID NO: 3266 - protein, 117 aa, synthetic construct
EVQLVESGGGLVQPGGSLRLSCAVSGFTFRSYGMSWVRQAPGKGLEWVALISSGGSYTYYTDSVKGRFTISRDNSKNTLYLQMGSLRAEDMAVYYCSRHGGNFFDYWGQGTTVTVSS

SEQ ID NO: 3267 - protein, 117 aa, synthetic construct
EVQLVESGGGLVQPGGSLRLSCSVSGFTFRSYGMSWVRQAPGKGLEWVALISSGGSYTYYTDSVKGRFTISRDNSKNTLYVQMSSLRAEDTAVYYCSRHGGNFFDYWGQGTTVTVSS

SEQ ID NO: 3268 - protein, 117 aa, synthetic construct
EVQLVESGGGLVQPGGSLRLSCAVSGFTFRSYGMSWVRQAPGKGLEWVALISSGGSYTYYTDSVKGRFIISRDNSRNSLYLQKNRRRAEDMAVYYCSRHGGNFFDYWGQGTTVTVSS

SEQ ID NO: 3269 - protein, 117 aa, synthetic construct
EVQLVESGGGLVQPGGSLRLSCAVSGFTFRSYGMSWVHQAPGKGLEWVALISSGGSYTYYTDSVKGRFIISRDNSRNTLYLQTNSLRAEDTAVYYCSRHGGNFFDYWGQGTTVTVSS

SEQ ID NO: 3270 - protein, 117 aa, synthetic construct
EVHLVESGGGLVQPGGALRLSCAVSGFTFRSYGMSWVRQATGKGLEWVALISSGGSYTYYTDSVKGRFTISRENAKNSLYLQMNSLRAGDTAVYYCSRHGGNFFDYWGQGTTVTVSS

SEQ ID NO: 3271 - protein, 117 aa, synthetic construct
EVQLVESGGGLVQPRGSLRLSCAVSGFTFRSYGMSWVRQAPGKGLEWVALISSGGSYTYYTDSVKGRFTISRDNSKNTLYLQMNNLRAEGTAVYYCSRHGGNFFDYWGQGTTVTVSS

SEQ ID NO: 3272 - protein, 117 aa, synthetic construct
EVQLVESGGGLVQPRGSLRLSCAVSGFTFRSYGMSWVRQAPGKGLEWVALISSGGSYTYYTDSVKGRFTISRDNSKNTLYLQMNNLRAEGTAAYYCSRHGGNFFDYWGQGTTVTVSS

SEQ ID NO: 3273 - protein, 117 aa, synthetic construct
QVQLVQSGAEVKKPGASVKVSCKVSGFTFRSYGMSWVRQAPGKGLEWVALISSGGSYTYYTDSVKGRFTITRDNSTNTLYMELSSLRSEDTAVYYCSRHGGNFFDYWGQGTTVTVSS

SEQ ID NO: 3274 - protein, 117 aa, synthetic construct
QVQLVQSGSELKKPGASVKVSCKVSGFTFRSYGMSWVRQAPGQGLEWVALISSGGSYTYYTDSVKGRFVISRDNSVNTLYLQISSLKAEDTAVYYCSRHGGNFFDYWGQGTTVTVSS

SEQ ID NO: 3275-3277 - skipped (3 entries)

SEQ ID NO: 3278 - protein, 469 aa, synthetic construct
METDTLLLWVLLLWVPGSTGQVQLVQSGAEVKKPGSSVKVSCKASGYSFTTYYIHWVRQAPGQGLEWMGWFFPGSGNIKYNEKFKGRVTITADTSTSTAYMELSSLRSEDTAVYYCAGSYYSYDVLDYWGQGTTVTVSSASTKGPSVFPLAPSSKSTSGGTAALGCLVKDYFPEPVTVSWNSGALTSGVHTFPAVLQSSGLYSLSSVVTVPSSSLGTQTYICNVNHKPSNTKVDKRVEPKSCDKTHTCPPCPAPELLGGPSVFLFPPKPKDTLMISRTPEVTCVVVDVSHEDPEVKFNWYVDGVEVHNAKTKPREEQYNSTYRVVSVLTVLHQDWLNGKEYKCKVSNKALPAPIEKTISKAKGQPREPQVYTLPPSREEMTKNQVSLTCLVKGFYPSDIAVEWESNGQPENNYKTTPPVLDSDGSFFLYSKLTVDKSRWQQGNVFSCSVMHEALHNHYTQKSLSLSPGK

SEQ ID NO: 3279 - protein, 234 aa, synthetic construct
METDTLLLWVLLLWVPGSTGDIQMTQSPSSLSASVGDRVTITCKASQNVGINVVWHQQKPGKVPKALIYSSSHRYSGVPSRFSGSGSGTDFTLTISSLQPEDVATYFCQQFKSYPLTFGQGTKLEIKRTVAAPSVFIFPPSDEQLKSGTASVVCLLNNFYPREAKVQWKVDNALQSGNSQESVTEQDSKDSTYSLSSTLTLSKADYEKHKVYACEVTHQGLSSPVTKSFNRGEC

SEQ ID NO: 3280 - protein, 247 aa, synthetic construct
METDTLLLWVLLLWVPGSTGDKTHTCPPCPAPELLGGPSVFLFPPKPKDTLMISRTPEVTCVVVDVSHEDPEVKFNWYVDGVEVHNAKTKPREEQYNSTYRVVSVLTVLHQDWLNGKEYKCKVSNKALPAPIEKTISKAKGQPREPQVYTLPPCREEMTKNQVSLWCLVKGFYPSDIAVEWESNGQPENNYKTTPPVLDSDGSFFLYSKLTVDKSRWQQGNVFSCSVMHEALHNRFTQKSLSLSPGK

SEQ ID NO: 3281 - protein, 520 aa, synthetic construct
METDTLLLWVLLLWVPGSTGEVQLVESGGGLVQPGGSLRLSCAASGFTFSNFGMHWVRQAPGKGLEWVSYISSGSSTIYYADTLKGRFTISRDNSKNTLYLQMNSLRAEDTAVYYCARRGEGAMDYWGQGTTVTVSSGGGGSGGGGSGGGGSGGGGSDNQLTQSPSFLSASVGDRVTITCRASSSVNYIYWYQQKPGKAPKLLIYYTSNLAPGVPSRFSGSGSGNEYTLTISSLQPEDFATYYCQQFTSSPFTFGQGTKLEIKGGGGSDKTHTCPPCPAPELLGGPSVFLFPPKPKDTLMISRTPEVTCVVVDVSHEDPEVKFNWYVDGVEVHNAKTKPREEQYNSTYRVVSVLTVLHQDWLNGKEYKCKVSNKALPAPIEKTISKAKGQPREPQVCTLPPSREEMTKNQVSLSCAVKGFYPSDIAVEWESNGQPENNYKTTPPVLDSDGSFFLVSKLTVDKSRWQQGNVFSCSVMHEALHNHYTQKSLSLSPGKGGGGSGGGGSGLNDIFEAQKIEWHE

SEQ ID NO: 3282 - protein, 284 aa, synthetic construct
METDTLLLWVLLLWVPGSTGGLNDIFEAQKIEWHEGGGGSEPRTDTDTCPNPPDPCPTCPTPDLLGGPSVFIFPPKPKDVLMISLTPKITCVVVDVSEEEPDVQFNWYVNNVEDKTAQTETRQRQYNSTYRVVSVLPIKHQDWMSGKVFKCKVNNNALPSPIEKTISKPRGQVRVPQIYTFPPPIEQTVKKDVSVTCLVTGFLPQDIHVEWESNGQPQPEQNYKNTQPVLDSDGSYFLYSKLNVPKSRWDQGDSFTCSVIHEALHNHHMTKTISRSLGNGGGGS

SEQ ID NO: 3283 - skipped

SEQ ID NO: 3284 - protein, 469 aa, synthetic construct
METDTLLLWVLLLWVPGSTGQVQLQQSGPELVKPGASVKISCKASGYAFSSSWMNWVKQRPGQGLEWIGRIYPGDGDTKYNGKFKGKATLTADKSSSTAYMHLSSLTSVDSAVYFCARRGTGGWYFDVWGAGTTVTVSSAKTTAPSVYPLAPVCGDTTGSSVTLGCLVKGYFPEPVTLTWNSGSLSSGVHTFPAVLQSDLYTLSSSVTVTSSTWPSQSITCNVAHPASSTKVDKKIEPRGPTIKPCPPCKCPAPNLLGGPSVFIFPPKIKDVLMISLSPIVTCVVVDVSEDDPDVQISWFVNNVEVHTAQTQTHREDYNSTLRVVSALPIQHQDWMSGKEFKCKVNNKDLPAPIERTISKPKGSVRAPQVYVLPPPEEEMTKKQVTLTCMVTDFMPEDIYVEWTNNGKTELNYKNTEPVLDSDGSYFMYSKLRVEKKNWVERNSYSCSVVHEGLHNHHTTKSFSRTPGK

SEQ ID NO: 3285 - protein, 238 aa, synthetic construct
METDTLLLWVLLLWVPGSTGDIVLTQSPASLAVSLGQRATISCRASESVDSSGNSFMHWYQQKPGQPPQLLIYRASNLESGIPARFSGSGSRTDFTLTINPVEADDVATFYCQQSFDDPFTFGSGTKLEIKRADAAPTVSIFPPSSEQLTSGGASVVCFLNNFYPKDINVKWKIDGSERQNGVLNSWTDQDSKDSTYSMSSTLTLTKDEYERHNSYTCEATHKTSTSPIVKSFNRNEC

SEQ ID NO: 3286-3288 - skipped (3 entries)

SEQ ID NO: 3289 - protein, 107 aa, synthetic construct; identical to SEQ ID NO: 230
  VARIANT 30: note = G, E, A, or D
  VARIANT 31: note = N or D
  VARIANT 32: note = R or K
  VARIANT 36: note = Y or H
  VARIANT 56: note = K or S

SEQ ID NO: 3290 - protein, 119 aa, synthetic construct; identical to SEQ ID NO: 231
  VARIANT 27: note = H, T, G, or Y
  VARIANT 28: note = D, T, or S
  VARIANT 30: note = H, R, D, K, or T
  VARIANT 31: note = L, D, K, T, or N
  VARIANT 32: note = W, F, T, I, Y, or G
  VARIANT 50: note = R or W
  VARIANT 51: note = V, I, or F
  VARIANT 52: note = F, S, or Y
  VARIANT 53: note = A or P
  VARIANT 57: note = N or S
  VARIANT 58: note = T, V, Y, or I
  VARIANT 59: note = K or R
  VARIANT 98: note = G or V
  VARIANT 100: note = Y or I
  VARIANT 103: note = Y or A
  VARIANT 104: note = D or G

SEQ ID NO: 3291-3376 - skipped (86 entries)

SEQ ID NO: 3377 - protein, 107 aa, synthetic construct; identical to SEQ ID NO: 93

SEQ ID NO: 3378 - protein, 107 aa, synthetic construct; identical to SEQ ID NO: 117

SEQ ID NO: 3379 - protein, 107 aa, synthetic construct; identical to SEQ ID NO: 199

SEQ ID NO: 3380 - protein, 107 aa, synthetic construct; identical to SEQ ID NO: 181

SEQ ID NO: 3381 - protein, 107 aa, synthetic construct; identical to SEQ ID NO: 87

SEQ ID NO: 3382 - protein, 107 aa, synthetic construct; identical to SEQ ID NO: 160

SEQ ID NO: 3383 - protein, 107 aa, synthetic construct; identical to SEQ ID NO: 147

SEQ ID NO: 3384 - protein, 107 aa, synthetic construct; identical to SEQ ID NO: 141

SEQ ID NO: 3385 - protein, 107 aa, synthetic construct; identical to SEQ ID NO: 81

SEQ ID NO: 3386 - protein, 107 aa, synthetic construct; identical to SEQ ID NO: 90

SEQ ID NO: 3387 - protein, 107 aa, synthetic construct; identical to SEQ ID NO: 102

SEQ ID NO: 3388 - protein, 107 aa, synthetic construct; identical to SEQ ID NO: 99

SEQ ID NO: 3389 - protein, 107 aa, synthetic construct; identical to SEQ ID NO: 108

SEQ ID NO: 3390 - protein, 119 aa, synthetic construct; identical to SEQ ID NO: 221

SEQ ID NO: 3391 - protein, 119 aa, synthetic construct; identical to SEQ ID NO: 223

SEQ ID NO: 3392 - protein, 119 aa, synthetic construct; identical to SEQ ID NO: 225

SEQ ID NO: 3393 - protein, 119 aa, synthetic construct; identical to SEQ ID NO: 219

SEQ ID NO: 3394 - protein, 119 aa, synthetic construct; identical to SEQ ID NO: 217

SEQ ID NO: 3395 - protein, 119 aa, synthetic construct; identical to SEQ ID NO: 211

SEQ ID NO: 3396 - protein, 119 aa, synthetic construct; identical to SEQ ID NO: 215

SEQ ID NO: 3397 - protein, 119 aa, synthetic construct; identical to SEQ ID NO: 213

SEQ ID NO: 3398 - protein, 119 aa, synthetic construct; identical to SEQ ID NO: 207

SEQ ID NO: 3399 - protein, 119 aa, synthetic construct; identical to SEQ ID NO: 209

SEQ ID NO: 3400 - protein, 119 aa, synthetic construct; identical to SEQ ID NO: 121

SEQ ID NO: 3401 - protein, 119 aa, synthetic construct; identical to SEQ ID NO: 182

SEQ ID NO: 3402 - protein, 119 aa, synthetic construct; identical to SEQ ID NO: 176

SEQ ID NO: 3403 - protein, 119 aa, synthetic construct; identical to SEQ ID NO: 158

SEQ ID NO: 3404 - protein, 119 aa, synthetic construct; identical to SEQ ID NO: 155

SEQ ID NO: 3405 - protein, 119 aa, synthetic construct; identical to SEQ ID NO: 118

SEQ ID NO: 3406 - protein, 119 aa, synthetic construct; identical to SEQ ID NO: 82

SEQ ID NO: 3407 - protein, 119 aa, synthetic construct; identical to SEQ ID NO: 106

SEQ ID NO: 3408 - protein, 119 aa, synthetic construct; identical to SEQ ID NO: 200

SEQ ID NO: 3409 - protein, 119 aa, synthetic construct; identical to SEQ ID NO: 124

SEQ ID NO: 3410 - protein, 119 aa, synthetic construct; identical to SEQ ID NO: 94

SEQ ID NO: 3411 - protein, 119 aa, synthetic construct; identical to SEQ ID NO: 151

SEQ ID NO: 3412 - protein, 119 aa, synthetic construct; identical to SEQ ID NO: 197

SEQ ID NO: 3413 - protein, 119 aa, synthetic construct; identical to SEQ ID NO: 130

SEQ ID NO: 3414 - protein, 119 aa, synthetic construct; identical to SEQ ID NO: 173

SEQ ID NO: 3415 - protein, 119 aa, synthetic construct; identical to SEQ ID NO: 142

SEQ ID NO: 3416 - protein, 119 aa, synthetic construct; identical to SEQ ID NO: 91

SEQ ID NO: 3417 - protein, 119 aa, synthetic construct; identical to SEQ ID NO: 139

SEQ ID NO: 3418 - protein, 119 aa, synthetic construct; identical to SEQ ID NO: 185

SEQ ID NO: 3419 - protein, 119 aa, synthetic construct; identical to SEQ ID NO: 133

SEQ ID NO: 3420 - protein, 119 aa, synthetic construct; identical to SEQ ID NO: 188

SEQ ID NO: 3421 - protein, 119 aa, synthetic construct; identical to SEQ ID NO: 109

SEQ ID NO: 3422 - protein, 119 aa, synthetic construct; identical to SEQ ID NO: 97

SEQ ID NO: 3423 - protein, 119 aa, synthetic construct; identical to SEQ ID NO: 85

SEQ ID NO: 3424 - protein, 119 aa, synthetic construct; identical to SEQ ID NO: 115

SEQ ID NO: 3425 - protein, 119 aa, synthetic construct; identical to SEQ ID NO: 191

SEQ ID NO: 3426 - protein, 119 aa, synthetic construct; identical to SEQ ID NO: 136

SEQ ID NO: 3427 - protein, 119 aa, synthetic construct; identical to SEQ ID NO: 203

SEQ ID NO: 3428 - protein, 119 aa, synthetic construct; identical to SEQ ID NO: 103

SEQ ID NO: 3429 - protein, 119 aa, synthetic construct; identical to SEQ ID NO: 205

SEQ ID NO: 3430 - protein, 119 aa, synthetic construct; identical to SEQ ID NO: 100

SEQ ID NO: 3431 - protein, 119 aa, synthetic construct; identical to SEQ ID NO: 179

SEQ ID NO: 3432 - protein, 119 aa, synthetic construct; identical to SEQ ID NO: 88

SEQ ID NO: 3433 - protein, 119 aa, synthetic construct; identical to SEQ ID NO: 167

SEQ ID NO: 3434 - protein, 119 aa, synthetic construct; identical to SEQ ID NO: 161

SEQ ID NO: 3435 - protein, 119 aa, synthetic construct; identical to SEQ ID NO: 145

SEQ ID NO: 3436 - protein, 119 aa, synthetic construct; identical to SEQ ID NO: 148

SEQ ID NO: 3437-5999 - skipped (2563 entries)

SEQ ID NO: 6000 - protein, 7 aa, synthetic construct
TGGYHWN

SEQ ID NO: 6001 - protein, 16 aa, synthetic construct
YIYSSGSTSYNPSLKS

SEQ ID NO: 6002 - protein, 8 aa, synthetic construct
GNWHYFDF

SEQ ID NO: 6003 - protein, 30 aa, synthetic construct
QIQLQESGPGLVKPSQSLSLTCSVTGFSIN

SEQ ID NO: 6004 - protein, 14 aa, synthetic construct
WIRQFPGKKLEWMG

SEQ ID NO: 6005 - protein, 32 aa, synthetic construct
RISITRDTSKNQFFLQLNSVTTEDTATYYCAR

SEQ ID NO: 6006 - protein, 11 aa, synthetic construct
WGQGTMVTVSS

SEQ ID NO: 6007 - protein, 7 aa, synthetic construct
TGGYHWN

SEQ ID NO: 6008 - protein, 16 aa, synthetic construct
YIYSSGTTRYNPSLKS

SEQ ID NO: 6009 - protein, 8 aa, synthetic construct
GNWHYFDY

SEQ ID NO: 6010 - protein, 30 aa, synthetic construct; identical to SEQ ID NO: 6003

SEQ ID NO: 6011 - protein, 14 aa, synthetic construct
WIRQFPGKKLEWMG

SEQ ID NO: 6012 - protein, 32 aa, synthetic construct
RISITRDTSKNQFFLQLNSVTPEDTATYYCTR

SEQ ID NO: 6013 - protein, 11 aa, synthetic construct
WGQGTLVAVSS

SEQ ID NO: 6014 - protein, 30 aa, synthetic construct
QIQLQESGPGLVKPSETLSLTCTVSGFSIN

SEQ ID NO: 6015 - protein, 14 aa, synthetic construct
WIRQPAGKGLEWIG

SEQ ID NO: 6016 - protein, 32 aa, synthetic construct
RVTMSRDTSKNQFSLKLSSVTAADTAVYYCAR

SEQ ID NO: 6017 - protein, 11 aa, synthetic construct
WGQGTMVTVSS

SEQ ID NO: 6018 - protein, 30 aa, synthetic construct
QIQLQESGPGLVKPSQTLSLTCTVSGFSIN

SEQ ID NO: 6019 - protein, 14 aa, synthetic construct
WIRQHPGKGLEWIG

SEQ ID NO: 6020 - protein, 32 aa, synthetic construct
LVTISRDTSKNQFSLKLSSVTAADTAVYYCAR

SEQ ID NO: 6021 - protein, 11 aa, synthetic construct
WGQGTMVTVSS

SEQ ID NO: 6022 - protein, 30 aa, synthetic construct
EIQLLESGGGLVQPGGSLRLSCAVSGFSIN

SEQ ID NO: 6023 - protein, 14 aa, synthetic construct
WVRQAPGKGLEWVG

SEQ ID NO: 6024 - protein, 32 aa, synthetic construct
RFTISRDTSKNTFYLQMNSLRAEDTAVYYCAR

SEQ ID NO: 6025 - protein, 11 aa, synthetic construct
WGQGTMVTVSS

SEQ ID NO: 6026 - protein, 30 aa, synthetic construct
QIQLVQSGAEVKKPGSSVKVSCKVSGFSIN

SEQ ID NO: 6027 - protein, 14 aa, synthetic construct
WVRQAPGQGLEWMG

SEQ ID NO: 6028 - protein, 32 aa, synthetic construct
RVTITRDTSTNTFYMELSSLRSEDTAVYYCAR

SEQ ID NO: 6029 - protein, 11 aa, synthetic construct
WGQGTMVTVSS

SEQ ID NO: 6030 - protein, 30 aa, synthetic construct
EIQLVESGGGLVQPGGSLRLSCAVSGFSIN

SEQ ID NO: 6031 - skipped

SEQ ID NO: 6032 - protein, 14 aa, synthetic construct
WVRQAPGKGLEWVG

SEQ ID NO: 6033 - protein, 32 aa, synthetic construct
RFTISRDTAKNSFYLQMNSLRAEDTAVYYCAR

SEQ ID NO: 6034 - protein, 11 aa, synthetic construct
WGQGTMVTVSS

SEQ ID NO: 6035 - protein, 30 aa, synthetic construct
QIQLVQSGAEVKKPGASVKVSCKVSGFSIN

SEQ ID NO: 6036 - protein, 14 aa, synthetic construct
WVRQAPGQGLEWMG

SEQ ID NO: 6037 - protein, 32 aa, synthetic construct
RVTMTRDTSTNTFYMELSSLRSEDTAVYYCAR

SEQ ID NO: 6038 - protein, 11 aa, synthetic construct
WGQGTMVTVSS

SEQ ID NO: 6039 - protein, 30 aa, synthetic construct; identical to SEQ ID NO: 6018

SEQ ID NO: 6040 - protein, 14 aa, synthetic construct
WIRQHPGKGLEWIG

SEQ ID NO: 6041 - protein, 32 aa, synthetic construct; identical to SEQ ID NO: 6020

SEQ ID NO: 6042 - protein, 11 aa, synthetic construct
WGQGTLVTVSS

SEQ ID NO: 6043 - protein, 30 aa, synthetic construct; identical to SEQ ID NO: 6014

SEQ ID NO: 6044 - protein, 14 aa, synthetic construct
WIRQPAGKGLEWIG

SEQ ID NO: 6045 - protein, 32 aa, synthetic construct; identical to SEQ ID NO: 6016

SEQ ID NO: 6046 - protein, 11 aa, synthetic construct
WGQGTLVTVSS

SEQ ID NO: 6047 - protein, 30 aa, synthetic construct; identical to SEQ ID NO: 6022

SEQ ID NO: 6048 - protein, 14 aa, synthetic construct
WVRQAPGKGLEWVG

SEQ ID NO: 6049 - protein, 32 aa, synthetic construct; identical to SEQ ID NO: 6024

SEQ ID NO: 6050 - protein, 11 aa, synthetic construct
WGQGTLVTVSS

SEQ ID NO: 6051 - protein, 30 aa, synthetic construct
QIQLVESGGGLVKPGGSLRLSCAVSGFSIN

SEQ ID NO: 6052 - protein, 14 aa, synthetic construct
WIRQAPGKGLEWVG

SEQ ID NO: 6053 - protein, 32 aa, synthetic construct; identical to SEQ ID NO: 6033

SEQ ID NO: 6054 - protein, 11 aa, synthetic construct
WGQGTLVTVSS

SEQ ID NO: 6055 - protein, 30 aa, synthetic construct; identical to SEQ ID NO: 6035

SEQ ID NO: 6056 - protein, 14 aa, synthetic construct
WVRQAPGQGLEWMG

SEQ ID NO: 6057 - protein, 32 aa, synthetic construct; identical to SEQ ID NO: 6037

SEQ ID NO: 6058 - protein, 11 aa, synthetic construct
WGQGTLVTVSS

SEQ ID NO: 6059 - protein, 30 aa, synthetic construct
EIQLVQSGAEVKKPGATVKISCKVSGFSIN

SEQ ID NO: 6060 - protein, 14 aa, synthetic construct
WVQQAPGKGLEWMG

SEQ ID NO: 6061 - protein, 32 aa, synthetic construct; identical to SEQ ID NO: 6028

SEQ ID NO: 6062 - protein, 11 aa, synthetic construct
WGQGTLVTVSS

SEQ ID NO: 6063 - protein, 11 aa, synthetic construct
SGERLSDKYVH

SEQ ID NO: 6064 - protein, 7 aa, synthetic construct
ENDKRPS

SEQ ID NO: 6065 - skipped

SEQ ID NO: 6066 - protein, 22 aa, synthetic construct
SYTLTQPPLLSVALGHKATITC

SEQ ID NO: 6067 - protein, 15 aa, synthetic construct
WYQQKPGRAPVMVIY

SEQ ID NO: 6068 - skipped

SEQ ID NO: 6069 - protein, 10 aa, synthetic construct
FGSGTQLTVL

SEQ ID NO: 6070 - protein, 11 aa, synthetic construct
SGENLSDKYVH

SEQ ID NO: 6071 - protein, 7 aa, synthetic construct
ENEKRPS

SEQ ID NO: 6072 - protein, 10 aa, synthetic construct
HYWESINSVV

SEQ ID NO: 6073 - protein, 22 aa, synthetic construct
SYTLTQPPSLSVAPGQKATIIC

SEQ ID NO: 6074 - protein, 15 aa, synthetic construct
WYQQKPGRAPVMVIY

SEQ ID NO: 6075 - protein, 32 aa, synthetic construct
GIPDQFSGSNSGNIATLTISKAQPGSEADYYC

SEQ ID NO: 6076 - protein, 10 aa, synthetic construct
FGSGTHLTVL

SEQ ID NO: 6077 - protein, 22 aa, synthetic construct
QSVTTQPPSVSGAPGQRVTISC

SEQ ID NO: 6078 - protein, 15 aa, synthetic construct
WYQQLPGTAPKMLIY

SEQ ID NO: 6079 - protein, 32 aa, synthetic construct
GVPDRFSGSNSGNSASLAITGLQAEDEADYYC

SEQ ID NO: 6080 - protein, 10 aa, synthetic construct
FGGGTQLTVL

SEQ ID NO: 6081 - protein, 22 aa, synthetic construct
QSVTTQPPSASGTPGQRVTISC

SEQ ID NO: 6082 - protein, 15 aa, synthetic construct
WYQQLPGTAPKMLIY

SEQ ID NO: 6083 - protein, 32 aa, synthetic construct
GVPDRFSGSNSGNSASLAISGLQSEDEADYYC

SEQ ID NO: 6084 - protein, 10 aa, synthetic construct
FGGGTQLTVL

SEQ ID NO: 6085 - protein, 22 aa, synthetic construct
QSVTTQPPSASGTPGQRVTISC

SEQ ID NO: 6086 - protein, 15 aa, synthetic construct
WYQQLPGTAPKMLIY

SEQ ID NO: 6087 - protein, 32 aa, synthetic construct
GVPDRFSGSNSGNSASLAISGLRSEDEADYYC

SEQ ID NO: 6088 - protein, 10 aa, synthetic construct
FGGGTQLTVL

SEQ ID NO: 6089 - protein, 22 aa, synthetic construct
SSETTQPHSVSVATAQMARITC

SEQ ID NO: 6090 - protein, 15 aa, synthetic construct
WYQQKPGQDPVMVIY

SEQ ID NO: 6091 - protein, 32 aa, synthetic construct
GIPERFSGSNPGNTATLTISRIEAGDEADYYC

SEQ ID NO: 6092 - protein, 10 aa, synthetic construct
FGGGTQLTVL

SEQ ID NO: 6093 - protein, 23 aa, synthetic construct
DIQMTQSPSTLSASVGDRVTITC

SEQ ID NO: 6094 - protein, 15 aa, synthetic construct
WYQQKPGKAPKMLIY

SEQ ID NO: 6095 - protein, 32 aa, synthetic construct
GVPSRFSGSNSGNEATLTISSLQPDDFATYYC

SEQ ID NO: 6096 - protein, 10 aa, synthetic construct
FGQGTKVEIK

SEQ ID NO: 6097 - protein, 22 aa, synthetic construct
QYVLTQPPSASGTPGQRVTISC

SEQ ID NO: 6098 - protein, 15 aa, synthetic construct
WYQQLPGTAPKMLIY

SEQ ID NO: 6099 - protein, 32 aa, synthetic construct; identical to SEQ ID NO: 6083

SEQ ID NO: 6100 - protein, 10 aa, synthetic construct
FGEGTELTVL

SEQ ID NO: 6101 - protein, 22 aa, synthetic construct
QYVLTQPPSASGTPGQRVTISC

SEQ ID NO: 6102 - protein, 15 aa, synthetic construct
WYQQLPGTAPKMLIY

SEQ ID NO: 6103 - protein, 32 aa, synthetic construct; identical to SEQ ID NO: 6087

SEQ ID NO: 6104 - protein, 10 aa, synthetic construct
FGEGTELTVL

SEQ ID NO: 6105 - protein, 22 aa, synthetic construct
SYELTQPPSVSVSPGQTASITC

SEQ ID NO: 6106 - protein, 15 aa, synthetic construct
WYQQKPGQSPVMVIY

SEQ ID NO: 6107 - protein, 32 aa, synthetic construct
GIPERFSGSNSGNTATLTISGTQAMDEADYYC

SEQ ID NO: 6108 - protein, 10 aa, synthetic construct
FGEGTELTVL

SEQ ID NO: 6109 - protein, 23 aa, synthetic construct
DYVLTQSPLSLPVTPGEPASISC

SEQ ID NO: 6110 - protein, 15 aa, synthetic construct
WYLQKPGQSPQMLIY

SEQ ID NO: 6111 - protein, 32 aa, synthetic construct
GVPDRFSGSNSGNDATLKISRVEAEDVGVYYC

SEQ ID NO: 6112 - protein, 10 aa, synthetic construct
FGQGTKVEIK

SEQ ID NO: 6113 - protein, 23 aa, synthetic construct
AYQLTQSPSSLSASVGDRVTITC

SEQ ID NO: 6114 - protein, 15 aa, synthetic construct
WYQQKPGKAPKMLIY

SEQ ID NO: 6115 - protein, 32 aa, synthetic construct
GVPSRFSGSNSGNDATLTISSLQPEDFATYYC

SEQ ID NO: 6116 - protein, 10 aa, synthetic construct
FGQGTKVEIK

SEQ ID NO: 6117 - protein, 23 aa, synthetic construct
EYVLTQSPATLSVSPGERATLSC

SEQ ID NO: 6118 - protein, 15 aa, synthetic construct
WYQQKPGQAPRMLIY

SEQ ID NO: 6119 - protein, 32 aa, synthetic construct
GIPARFSGSNSGNEATLTISSLQSEDFAVYYC

SEQ ID NO: 6120 - protein, 10 aa, synthetic construct
FGQGTKVEIK

SEQ ID NO: 6121 - protein, 118 aa, synthetic construct
QIQLQESGPGLVKPSQSLSLTCSVTGFSINTGGYHWNWIRQFPGKKLEWMGYIYSSGSTSYNPSLKSRISITRDTSKNQFFLQLNSVTTEDTATYYCARGNWHYFDFWGQGTMVTVSS

SEQ ID NO: 6122 - protein, 118 aa, synthetic construct
QIQLQESGPGLVKPSQSLSLTCSVTGFSINTGGYHWNWIRQFPGKKLEWMGYIYSSGTTRYNPSLKSRISITRDTSKNQFFLQLNSVTPEDTATYYCTRGNWHYFDYWGQGTLVAVSS

SEQ ID NO: 6123 - protein, 118 aa, synthetic construct
QIQLQESGPGLVKPSETLSLTCTVSGFSINTGGYHWNWIRQPAGKGLEWIGYIYSSGSTSYNPSLKSRVTMSRDTSKNQFSLKLSSVTAADTAVYYCARGNWHYFDFWGQGTMVTVSS

SEQ ID NO: 6124 - protein, 118 aa, synthetic construct
QIQLQESGPGLVKPSQTLSLTCTVSGFSINTGGYHWNWIRQHPGKGLEWIGYIYSSGSTSYNPSLKSLVTISRDTSKNQFSLKLSSVTAADTAVYYCARGNWHYFDFWGQGTMVTVSS

SEQ ID NO: 6125 - protein, 118 aa, synthetic construct
EIQLLESGGGLVQPGGSLRLSCAVSGFSINTGGYHWNWVRQAPGKGLEWVGYIYSSGSTSYNPSLKSRFTISRDTSKNTFYLQMNSLRAEDTAVYYCARGNWHYFDFWGQGTMVTVSS

SEQ ID NO: 6126 - protein, 118 aa, synthetic construct
QIQLVQSGAEVKKPGSSVKVSCKVSGFSINTGGYHWNWVRQAPGQGLEWMGYIYSSGSTSYNPSLKSRVTITRDTSTNTFYMELSSLRSEDTAVYYCARGNWHYFDFWGQGTMVTVSS

SEQ ID NO: 6127 - protein, 118 aa, synthetic construct
EIQLVESGGGLVQPGGSLRLSCAVSGFSINTGGYHWNWVRQAPGKGLEWVGYIYSSGSTSYNPSLKSRFTISRDTAKNSFYLQMNSLRAEDTAVYYCARGNWHYFDFWGQGTMVTVSS

SEQ ID NO: 6128 - protein, 118 aa, synthetic construct
QIQLVQSGAEVKKPGASVKVSCKVSGFSINTGGYHWNWVRQAPGQGLEWMGYIYSSGSTSYNPSLKSRVTMTRDTSTNTFYMELSSLRSEDTAVYYCARGNWHYFDFWGQGTMVTVSS

SEQ ID NO: 6129 - protein, 118 aa, synthetic construct
QIQLQESGPGLVKPSQTLSLTCTVSGFSINTGGYHWNWIRQHPGKGLEWIGYIYSSGTTRYNPSLKSLVTISRDTSKNQFSLKLSSVTAADTAVYYCARGNWHYFDYWGQGTLVTVSS

SEQ ID NO: 6130 - protein, 118 aa, synthetic construct
QIQLQESGPGLVKPSETLSLTCTVSGFSINTGGYHWNWIRQPAGKGLEWIGYIYSSGTTRYNPSLKSRVTMSRDTSKNQFSLKLSSVTAADTAVYYCARGNWHYFDYWGQGTLVTVSS

SEQ ID NO: 6131 - protein, 118 aa, synthetic construct
EIQLLESGGGLVQPGGSLRLSCAVSGFSINTGGYHWNWVRQAPGKGLEWVGYIYSSGTTRYNPSLKSRFTISRDTSKNTFYLQMNSLRAEDTAVYYCARGNWHYFDYWGQGTLVTVSS

SEQ ID NO: 6132 - protein, 118 aa, synthetic construct
QIQLVESGGGLVKPGGSLRLSCAVSGFSINTGGYHWNWIRQAPGKGLEWVGYIYSSGTTRYNPSLKSRFTISRDTAKNSFYLQMNSLRAEDTAVYYCARGNWHYFDYWGQGTLVTVSS

SEQ ID NO: 6133 - protein, 118 aa, synthetic construct
QIQLVQSGAEVKKPGASVKVSCKVSGFSINTGGYHWNWVRQAPGQGLEWMGYIYSSGTTRYNPSLKSRVTMTRDTSTNTFYMELSSLRSEDTAVYYCARGNWHYFDYWGQGTLVTVSS

SEQ ID NO: 6134 - protein, 118 aa, synthetic construct
EIQLVQSGAEVKKPGATVKISCKVSGFSINTGGYHWNWVQQAPGKGLEWMGYIYSSGTTRYNPSLKSRVTITRDTSTNTFYMELSSLRSEDTAVYYCARGNWHYFDYWGQGTLVTVSS

SEQ ID NO: 6135 - skipped

SEQ ID NO: 6136 - protein, 107 aa, synthetic construct
SYTLTQPPSLSVAPGQKATIICSGENLSDKYVHWYQQKPGRAPVMVIYENEKRPSGIPDQFSGSNSGNIATLTISKAQPGSEADYYCHYWESINSVVFGSGTHLTVL

SEQ ID NO: 6137 - protein, 107 aa, synthetic construct
QSVTTQPPSVSGAPGQRVTISCSGERLSDKYVHWYQQLPGTAPKMLIYENDKRPSGVPDRFSGSNSGNSASLAITGLQAEDEADYYCQSWDSTNSAVFGGGTQLTVL

SEQ ID NO: 6138 - protein, 107 aa, synthetic construct
QSVTTQPPSASGTPGQRVTISCSGERLSDKYVHWYQQLPGTAPKMLIYENDKRPSGVPDRFSGSNSGNSASLAISGLQSEDEADYYCQSWDSTNSAVFGGGTQLTVL

SEQ ID NO: 6139 - protein, 107 aa, synthetic construct
QSVTTQPPSASGTPGQRVTISCSGERLSDKYVHWYQQLPGTAPKMLIYENDKRPSGVPDRFSGSNSGNSASLAISGLRSEDEADYYCQSWDSTNSAVFGGGTQLTVL

SEQ ID NO: 6140 - protein, 107 aa, synthetic construct
SSETTQPHSVSVATAQMARITCSGERLSDKYVHWYQQKPGQDPVMVIYENDKRPSGIPERFSGSNPGNTATLTISRIEAGDEADYYCQSWDSTNSAVFGGGTQLTVL

SEQ ID NO: 6141 - protein, 108 aa, synthetic construct
DIQMTQSPSTLSASVGDRVTITCSGERLSDKYVHWYQQKPGKAPKMLIYENDKRPSGVPSRFSGSNSGNEATLTISSLQPDDFATYYCQSWDSTNSAVFGQGTKVEIK

SEQ ID NO: 6142 - protein, 107 aa, synthetic construct
QYVLTQPPSASGTPGQRVTISCSGENLSDKYVHWYQQLPGTAPKMLIYENEKRPSGVPDRFSGSNSGNSASLAISGLQSEDEADYYCHYWESINSVVFGEGTELTVL

SEQ ID NO: 6143 - protein, 107 aa, synthetic construct
QYVLTQPPSASGTPGQRVTISCSGENLSDKYVHWYQQLPGTAPKMLIYENEKRPSGVPDRFSGSNSGNSASLAISGLRSEDEADYYCHYWESINSVVFGEGTELTVL

SEQ ID NO: 6144 - protein, 107 aa, synthetic construct
SYELTQPPSVSVSPGQTASITCSGENLSDKYVHWYQQKPGQSPVMVIYENEKRPSGIPERFSGSNSGNTATLTISGTQAMDEADYYCHYWESINSVVFGEGTELTVL

SEQ ID NO: 6145 - protein, 108 aa, synthetic construct
DYVLTQSPLSLPVTPGEPASISCSGENLSDKYVHWYLQKPGQSPQMLIYENEKRPSGVPDRFSGSNSGNDATLKISRVEAEDVGVYYCHYWESINSVVFGQGTKVEIK

SEQ ID NO: 6146 - protein, 108 aa, synthetic construct
AYQLTQSPSSLSASVGDRVTITCSGENLSDKYVHWYQQKPGKAPKMLIYENEKRPSGVPSRFSGSNSGNDATLTISSLQPEDFATYYCHYWESINSVVFGQGTKVEIK

SEQ ID NO: 6147 - protein, 108 aa, synthetic construct
EYVLTQSPATLSVSPGERATLSCSGENLSDKYVHWYQQKPGQAPRMLIYENEKRPSGIPARFSGSNSGNEATLTISSLQSEDFAVYYCHYWESINSVVFGQGTKVEIK

SEQ ID NO: 6148 - protein, 448 aa, synthetic construct
QIQLQESGPGLVKPSQSLSLTCSVTGFSINTGGYHWNWIRQFPGKKLEWMGYIYSSGSTSYNPSLKSRISITRDTSKNQFFLQLNSVTTEDTATYYCARGNWHYFDFWGQGTMVTVSSASTKGPSVFPLAPSSKSTSGGTAALGCLVKDYFPEPVTVSWNSGALTSGVHTFPAVLQSSGLYSLSSVVTVPSSSLGTQTYICNVNHKPSNTKVDKRVEPKSCDKTHTCPPCPAPELLGGPSVFLFPPKPKDTLMISRTPEVTCVVVDVSHEDPEVKFNWYVDGVEVHNAKTKPREEQYASTYRVVSVLTVLHQDWLNGKEYKCKVSNKALPAPIEKTISKAKGQPREPQVCTLPPSREEMTKNQVSLSCAVKGFYPSDIAVEWESNGQPENNYKTTPPVLDSDGSFFLVSKLTVDKSRWQQGNVFSCSVMHEALHNHYTQKSLSLSPGK

SEQ ID NO: 6149 - protein, 448 aa, synthetic construct
QIQLQESGPGLVKPSQSLSLTCSVTGFSINTGGYHWNWIRQFPGKKLEWMGYIYSSGSTSYNPSLKSRISITRDTSKNQFFLQLNSVTTEDTATYYCARGNWHYFDFWGQGTMVTVSSASTKGPSVFPLAPSSKSTSGGTAALGCLVKDYFPEPVTVSWNSGALTSGVHTFPAVLQSSGLYSLSSVVTVPSSSLGTQTYICNVNHKPSNTKVDKRVEPKSCDKTHTCPPCPAPELLGGPSVFLFPPKPKDTLMISRTPEVTCVVVDVSHEDPEVKFNWYVDGVEVHNAKTKPREEQYNSTYRVVSVLTVLHQDWLNGKEYKCKVSNKALPAPIEKTISKAKGQPREPQVCTLPPSREEMTKNQVSLSCAVKGFYPSDIAVEWESNGQPENNYKTTPPVLDSDGSFFLVSKLTVDKSRWQQGNVFSCSVMHEALHNHYTQKSLSLSPGK

SEQ ID NO: 6150 - protein, 213 aa, synthetic construct
SYTLTQPPLLSVALGHKATITCSGERLSDKYVHWYQQKPGRAPVMVIYENDKRPSGIPDQFSGSNSGNIATLTISKAQAGYEADYYCQSWDSTNSAVFGSGTQLTVLGQPKANPTVTLFPPSSEELQANKATLVCLISDFYPGAVTVAWKADGSPVKAGVETTKPSKQSNNKYAASSYLSLTPEQWKSHRSYSCQVTHEGSTVEKTVAPTECS

SEQ ID NO: 6151 - protein, 448 aa, synthetic construct
QIQLQESGPGLVKPSQSLSLTCSVTGFSINTGGYHWNWIRQFPGKKLEWMGYIYSSGTTRYNPSLKSRISITRDTSKNQFFLQLNSVTPEDTATYYCTRGNWHYFDYWGQGTLVAVSSASTKGPSVFPLAPSSKSTSGGTAALGCLVKDYFPEPVTVSWNSGALTSGVHTFPAVLQSSGLYSLSSVVTVPSSSLGTQTYICNVNHKPSNTKVDKRVEPKSCDKTHTCPPCPAPELLGGPSVFLFPPKPKDTLMISRTPEVTCVVVDVSHEDPEVKFNWYVDGVEVHNAKTKPREEQYASTYRVVSVLTVLHQDWLNGKEYKCKVSNKALPAPIEKTISKAKGQPREPQVCTLPPSREEMTKNQVSLSCAVKGFYPSDIAVEWESNGQPENNYKTTPPVLDSDGSFFLVSKLTVDKSRWQQGNVFSCSVMHEALHNHYTQKSLSLSPGK

SEQ ID NO: 6152 - protein, 448 aa, synthetic construct
QIQLQESGPGLVKPSQSLSLTCSVTGFSINTGGYHWNWIRQFPGKKLEWMGYIYSSGTTRYNPSLKSRISITRDTSKNQFFLQLNSVTPEDTATYYCTRGNWHYFDYWGQGTLVAVSSASTKGPSVFPLAPSSKSTSGGTAALGCLVKDYFPEPVTVSWNSGALTSGVHTFPAVLQSSGLYSLSSVVTVPSSSLGTQTYICNVNHKPSNTKVDKRVEPKSCDKTHTCPPCPAPELLGGPSVFLFPPKPKDTLMISRTPEVTCVVVDVSHEDPEVKFNWYVDGVEVHNAKTKPREEQYNSTYRVVSVLTVLHQDWLNGKEYKCKVSNKALPAPIEKTISKAKGQPREPQVCTLPPSREEMTKNQVSLSCAVKGFYPSDIAVEWESNGQPENNYKTTPPVLDSDGSFFLVSKLTVDKSRWQQGNVFSCSVMHEALHNHYTQKSLSLSPGK

SEQ ID NO: 6153 - protein, 213 aa, synthetic construct
SYTLTQPPSLSVAPGQKATIICSGENLSDKYVHWYQQKPGRAPVMVIYENEKRPSGIPDQFSGSNSGNIATLTISKAQPGSEADYYCHYWESINSVVFGSGTHLTVLGQPKANPTVTLFPPSSEELQANKATLVCLISDFYPGAVTVAWKADGSPVKAGVETTKPSKQSNNKYAASSYLSLTPEQWKSHRSYSCQVTHEGSTVEKTVAPTECS

SEQ ID NO: 6154-6174 - skipped (21 entries)

SEQ ID NO: 6175 - protein, 243 aa, synthetic construct
QVHLQESGPGLVKPSETLSLTCTVSDDSISSYYWSWIRQPPGKGLEWIGHISYSGSANYNPSLKSRVTISVDTSKNQFSLKLSSVTAADTAVYYCANWDDAFNIWGQGTMVTVSSGGGGSGGGGSGGGGSGGGGSEIVLTQSPGTLSLSPGERATLSCRASQSVSSSYLAWYQQKPGQAPRLLIYGASSRATGIPDRFSGSGSGTDFTLTISRLEPEDFAVYYCQQYGSSPWTFGQGTKVEIK

SEQ ID NO: 6176 - protein, 115 aa, synthetic construct
QVHLQESGPGLVKPSETLSLTCTVSDDSISSYYWSWIRQPPGKGLEWIGHISYSGSANYNPSLKSRVTISVDTSKNQFSLKLSSVTAADTAVYYCANWDDAFNIWGQGTMVTVSS

SEQ ID NO: 6177 - protein, 108 aa, synthetic construct
EIVLTQSPGTLSLSPGERATLSCRASQSVSSSYLAWYQQKPGQAPRLLIYGASSRATGIPDRFSGSGSGTDFTLTISRLEPEDFAVYYCQQYGSSPWTFGQGTKVEIK

SEQ ID NO: 6178 - protein, 250 aa, synthetic construct
EVQLVQSGAEVKEPGESLKISCKNSGYSFTNYWVGWVRQMPGKGLEWMGIIYPGDSDTRYSPSFQGQVTISADKSINTAYLQWSSLKASDTAMYYCGRLTMFRGIIIGYFDYWGQGTLVTVSSGGGGSGGGGSGGGGSGGGGSEIVLTQSPATLSLSPGERATLSCRASQSVSSYLAWYQQKPGQAPRLLIYDASNRATGIPARFSGSGSGTDFTLTISSLEPEDFAVYYCQQRSNWPWTFGQGTKVEIK

SEQ ID NO: 6179 - protein, 123 aa, synthetic construct
EVQLVQSGAEVKEPGESLKISCKNSGYSFTNYWVGWVRQMPGKGLEWMGIIYPGDSDTRYSPSFQGQVTISADKSINTAYLQWSSLKASDTAMYYCGRLTMFRGIIIGYFDYWGQGTLVTVSS

SEQ ID NO: 6180 - protein, 107 aa, synthetic construct
EIVLTQSPATLSLSPGERATLSCRASQSVSSYLAWYQQKPGQAPRLLIYDASNRATGIPARFSGSGSGTDFTLTISSLEPEDFAVYYCQQRSNWPWTFGQGTKVEIK

SEQ ID NO: 6181 - protein, 247 aa, synthetic construct
QVQLQQSGPELVKPGASVKMSCKASGYTFTDYVINWGKQRSGQGLEWIGEIYPGSGTNYYNEKFKAKATLTADKSSNIAYMQLSSLTSEDSAVYFCARRGRYGLYAMDYWGQGTSVTVSSGGGGSGGGGSGGGGSGGGGSDIQMTQTTSSLSASLGDRVTISCRASQDISNYLNWYQQKPDGTVKLLIYYTSRLHSGVPSRFSGSGSGTDYSLTINNLEQEDIATYFCQQGNTRPWTFGGGTKLEIK

SEQ ID NO: 6182 - protein, 120 aa, synthetic construct
QVQLQQSGPELVKPGASVKMSCKASGYTFTDYVINWGKQRSGQGLEWIGEIYPGSGTNYYNEKFKAKATLTADKSSNIAYMQLSSLTSEDSAVYFCARRGRYGLYAMDYWGQGTSVTVSS

SEQ ID NO: 6183 - protein, 107 aa, synthetic construct
DIQMTQTTSSLSASLGDRVTISCRASQDISNYLNWYQQKPDGTVKLLIYYTSRLHSGVPSRFSGSGSGTDYSLTINNLEQEDIATYFCQQGNTRPWTFGGGTKLEIK

SEQ ID NO: 6184 - protein, 239 aa, synthetic construct
EVQLVESGGGVVRPGGSLRLSCAASGFTFDDYGMSWVRQAPGKGLEWVSGINWNGGSTGYADSVKGRFTISRDNAKNSLYLQMNSLRAEDTAVYYCARGRSLLFDYWGQGTLVTVSRGGGGSGGGGSGGGGSSELTQDPAVSVALGQTVRITCQGDSLRSYYASWYQQKPGQAPVLVIYGKNNRPSGIPDRFSGSSSGNTASLTITGAQAEDEADYYCNSRDSSGNHVVFGGGTKLTVL

SEQ ID NO: 6185 - protein, 117 aa, synthetic construct
EVQLVESGGGVVRPGGSLRLSCAASGFTFDDYGMSWVRQAPGKGLEWVSGINWNGGSTGYADSVKGRFTISRDNAKNSLYLQMNSLRAEDTAVYYCARGRSLLFDYWGQGTLVTVSR

SEQ ID NO: 6186 - protein, 108 aa, synthetic construct
SSELTQDPAVSVALGQTVRITCQGDSLRSYYASWYQQKPGQAPVLVIYGKNNRPSGIPDRFSGSSSGNTASLTITGAQAEDEADYYCNSRDSSGNHVVFGGGTKLTVL

SEQ ID NO: 6187 - protein, 245 aa, synthetic construct
QIQLQESGPGLVKPSQSLSLTCSVTGFSINTGGYHWNWIRQFPGKKLEWMGYIYSSGSTSYNPSLKSRISITRDTSKNQFFLQLNSVTTEDTATYYCARGNWHYFDFWGQGTMVTVSSGGGGSGGGGSGGGGSGGGGSSYTLTQPPLLSVALGHKATITCSGERLSDKYVHWYQQKPGRAPVMVIYENDKRPSGIPDQFSGSNSGNIATLTISKAQAGYEADYYCQSWDSTNSAVFGSGTQLTVL

SEQ ID NO: 6188 - protein, 245 aa, synthetic construct
SYTLTQPPLLSVALGHKATITCSGERLSDKYVHWYQQKPGRAPVMVIYENDKRPSGIPDQFSGSNSGNIATLTISKAQAGYEADYYCQSWDSTNSAVFGSGTQLTVLGGGGSGGGGSGGGGSGGGGSQIQLQESGPGLVKPSQSLSLTCSVTGFSINTGGYHWNWIRQFPGKKLEWMGYIYSSGSTSYNPSLKSRISITRDTSKNQFFLQLNSVTTEDTATYYCARGNWHYFDFWGQGTMVTVSS

SEQ ID NO: 6189 - protein, 245 aa, synthetic construct
QIQLQESGPGLVKPSQSLSLTCSVTGFSINTGGYHWNWIRQFPGKKLEWMGYIYSSGTTRYNPSLKSRISITRDTSKNQFFLQLNSVTPEDTATYYCTRGNWHYFDYWGQGTLVAVSSGGGGSGGGGSGGGGSGGGGSSYTLTQPPSLSVAPGQKATIICSGENLSDKYVHWYQQKPGRAPVMVIYENEKRPSGIPDQFSGSNSGNIATLTISKAQPGSEADYYCHYWESINSVVFGSGTHLTVL

SEQ ID NO: 6190 - protein, 245 aa, synthetic construct
SYTLTQPPSLSVAPGQKATIICSGENLSDKYVHWYQQKPGRAPVMVIYENEKRPSGIPDQFSGSNSGNIATLTISKAQPGSEADYYCHYWESINSVVFGSGTHLTVLGGGGSGGGGSGGGGSGGGGSQIQLQESGPGLVKPSQSLSLTCSVTGFSINTGGYHWNWIRQFPGKKLEWMGYIYSSGTTRYNPSLKSRISITRDTSKNQFFLQLNSVTPEDTATYYCTRGNWHYFDYWGQGTLVAVSS

SEQ ID NO: 6191 - protein, 114 aa, Homo sapiens
NWVNVISDLKKIEDLIQSMHIDATLYTESDVHPSCKVTAMKCFLLELQVISLESGDASIHDTVENLIILANNSLSSNGNVTESGCKECEELEEKNIKEFLQSFVHIVQMFINTS

SEQ ID NO: 6192 - protein, 77 aa, unidentified
  source 1..77: note = IL15Ralpha sequence
MAPRRARGCRTLGLPALLLLLLLRPPATRGITCPPPMSVEHADIWVKSYSLYSRERYICNSGFKRKAGTSSLTECVL

SEQ ID NO: 6193 - protein, 20 aa, synthetic construct
SGGSGGGGSGGGSGGGGSLQ

SEQ ID NO: 6194 - protein, 133 aa, Homo sapiens [sequence omitted]

SEQ ID NO: 6195 - protein, 157 aa, Homo sapiens
YFGKLESKLSVIRNLNDQVLFIDQGNRPLFEDMTDSDCRDNAPRTIFIISMYKDSQPRGMAVTISVKCEKISTLSCENKIISFKEMNPPDNIKDTKSDIIFFQRSVPGHDNKMQFESSSYEGYFLACEKERDLFKLILKKEDELGDRSIMFTVQNED

SEQ ID NO: 6196 - protein, 133 aa, Homo sapiens [sequence omitted]

SEQ ID NO: 6197 - protein, 138 aa, Homo sapiens
QDPYVKEAENLKKYFNAGHSDVADNGTLFLGILKNWKEESDRKIMQSQIVSFYFKLFKNFKDDQSIQKSVETIKEDMNVKFFNSNKKKRDDFEKLTNYSVTDLNVQRKAIHELIQVMAELSPAAKTGKRKRSQMLFRG

SEQ ID NO: 6198 - protein, 238 aa, unidentified
  source 1..238: note = B7-6 sequence
DLKVEMMAGGTQITPLNDNVTIFCNIFYSQPLNITSMGITWFWKSLTFDKEVKVFEFFGDHQEAFRPGAIVSPWRLKSGDASLRLPGIQLEEAGEYRCEVVVTPLKAQGTVQLEVVASPASRLLLDQVGMKENEDKYMCESSGFYPEAINITWEKQTQKFPHPIEISEDVITGPTIKNMDGTFNVTSCLKLNSSQEDPGTVYQCVVRHASLHTPLRSNFTLTAARHSLSETEKTDNFS

SEQ ID NO: 6199 - protein, 284 aa, unidentified
  source 1..284: note = MICA sequence
EPHSLRYNLTVLSWDGSVQSGFLTEVHLDGQPFLRCDRQKCRAKPQGQWAEDVLGNKTWDRETRDLTGNGKDLRMTLAHIKDQKEGLHSLQEIRVCEIHEDNSTRSSQHFYYDGELFLSQNLETKEWTMPQSSRAQTLAMNVRNFLKEDAMKTKTHYHAMHADCLQELRRYLKSGVVLRRTVPPMVNVTRSEASEGNITVTCRASGFYPWNITLSWRQDGVSLSHDTQQWGDVLPDGNGTYQTWVATRICQGEEQRFTCYMEHSGNHSTHPVPSGKVLVLQSHW

SEQ ID NO: 6200 - protein, 287 aa, unidentified
  source 1..287: note = MICB sequence
AEPHSLRYNLMVLSQDESVQSGFLAEGHLDGQPFLRYDRQKRRAKPQGQWAEDVLGAKTWDTETEDLTENGQDLRRTLTHIKDQKGGLHSLQEIRVCEIHEDSSTRGSRHFYYDGELFLSQNLETQESTVPQSSRAQTLAMNVTNFWKEDAMKTKTHYRAMQADCLQKLQRYLKSGVAIRRTVPPMVNVTCSEVSEGNITVTCRASSFYPRNITLTWRQDGVSLSHNTQQWGDVLPDGNGTYQTWVATRIRQGEEQRFTCYMEHSGNHGTHPVPSGKVLVLQSQRTD

SEQ ID NO: 6201 - protein, 191 aa, unidentified
  source 1..191: note = ULBP1 sequence
GWVDTHCLCYDFIITPKSRPEPQWCEVQGLVDERPFLHYDCVNHKAKAFASLGKKVNVTKTWEEQTETLRDVVDFLKGQLLDIQVENLIPIEPLTLQARMSCEHEAHGHGRGSWQFLFNGQKFLLFDSNNRKWTALHPGAKKMTEKWEKNRDVTMFFQKISLGDCKMWLEEFLMYWEQMLDPTKPPSLAPG

SEQ ID NO: 6202 - protein, 329 aa, unidentified
  source 1..329: note = NECTIN2 sequence
QDVRVQVLPEVRGQLGGTVELPCHLLPPVPGLYISLVTWQRPDAPANHQNVAAFHPKMGPSFPSPKPGSERLSFVSAKQSTGQDTEAELQDATLALHGLTVEDEGNYTCEFATFPKGSVRGMTWLRVIAKPKNQAEAQKVTFSQDPTTVALCISKEGRPPARISWLSSLDWEAKETQVSGTLAGTVTVTSRFTLVPSGRADGVTVTCKVEHESFEEPALIPVTLSVRYPPEVSISGYDDNWYLGRTDATLSCDVRSNPEPTGYDWSTTSGTFPTSAVAQGSQLVIHAVDSLFNTTFVCTVTNAVGMGRAEQVIFVRETPNTAGAGATGG

SEQ ID NO: 6203 - protein, 323 aa, unidentified
  source 1..323: note = NECL5 sequence
WPPPGTGDVVVQAPTQVPGFLGDSVTLPCYLQVPNMEVTHVSQLTWARHGESGSMAVFHQTQGPSYSESKRLEFVAARLGAELRNASLRMFGLRVEDEGNYTCLFVTFPQGSRSVDIWLRVLAKPQNTAEVQKVQLTGEPVPMARCVSTGGRPPAQITWHSDLGGMPNTSQVPGFLSGTVTVTSLWILVPSSQVDGKNVTCKVEHESFEKPQLLTVNLTVYYPPEVSISGYDNNWYLGQNEATLTCDARSNPEPTGYNWSTTMGPLPPFAVAQGAQLLIRPVDKPINTTLICNVTNALGARQAELTVQVKEGPPSEHSGISRN

SEQ ID NO: 6204 - protein, 330 aa, unidentified
  source 1..330: note = NECL2 sequence
QNLFTKDVTVIEGEVATISCQVNKSDDSVIQLLNPNRQTIYFRDFRPLKDSRFQLLNFSSSELKVSLTNVSISDEGRYFCQLYTDPPQESYTTITVLVPPRNLMIDIQKDTAVEGEEIEVNCTAMASKPATTIRWFKGNTELKGKSEVEEWSDMYTVTSQLMLKVHKEDDGVPVICQVEHPAVTGNLQTQRYLEVQYKPQVHIQMTYPLQGLTREGDALELTCEAIGKPQPVMVTWVRVDDEMPQHAVLSGPNLFINNLNKTDNGTYRCEASNIVGKAHSDYMLYVYDPPTTIPPPTTTTTTTTTTTTTILTIITDSRAGEEGSIRAVDH

SEQ ID NO: 6205 - protein, 155 aa, unidentified
  source 1..155: note = CD70 sequence
QRFAQAQQQLPLESLGWDVAELQLNHTGPQQDPRLYWQGGPALGRSFLHGPELDKGQLRIHRDGIYMVHIQVTLAICSSTTASRHHPTTLAVGICSPASRSISLLRLSFHQGCTIASQRLTPLARGDTLCTNLTGTLLPSRNTDETFFGVQWVRP

SEQ ID NO: 6206 - protein, 294 aa, unidentified
  source 1..294: note = L-selectin sequence
WTYHYSEKPMNWQRARRFCRDNYTDLVAIQNKAEIEYLEKTLPFSRSYYWIGIRKIGGIWTWVGTNKSLTEEAENWGDGEPNNKKNKEDCVEIYIKRNKDAGKWNDDACHKLKAALCYTASCQPWSCSGHGECVEIINNYTCNCDVGYYGPQCQFVIQCEPLEAPELGTMDCTHPLGNFSFSSQCAFSCSEGTNLTGIEETTCGPFGNWSSPEPTCQVIQCEPLSAPDLGIMNCSHPLASFSFTSACTFICSEGTELIGKKKTICESSGIWSNPSPICQKLDKSFSMIKEGDYN

SEQ ID NO: 6207 - protein, 243 aa, unidentified
  source 1..243: note = CD72 sequence
RYLQVSQQLQQTNRVLEVTNSSLRQQLRLKITQLGQSAEDLQGSRRELAQSQEALQVEQRAHQAAEGQLQACQADRQKTKETLQSEEQQRRALEQKLSNMENRLKPFFTCGSADTCCPSGWIMHQKSCFYISLTSKNWQESQKQCETLSSKLATFSEIYPQSHSYYFLNSLLPNGGSGNSYWTGLSSNKDWKLTDDTQRTRTYAQSSKCNKVHKTWSWWTLESESCRSSLPYICEMTAFRFPD

SEQ ID NO: 6208 - protein, 124 aa, unidentified
  source 1..124: note = CLEC2B (AICL) sequence
KLTRDSQSLCPYDWIGFQNKCYYFSKEEGDWNSSKYNCSTQHADLTIIDNIEEMNFLRRYKCSSDHWIGLKMAKNRTGQWVDGATFTKSFGMRGSEGCAYLSDDGAATARCYTERKWICRKRIH

SEQ ID NO: 6209 - protein, 194 aa, unidentified
  source 1..194: note = CD48 sequence
QGHLVHMTVVSGSNVTLNISESLPENYKQLTWFYTFDQKIVEWDSRKSKYFESKFKGRVRLDPQSGALYISKVQKEDNSTYIMRVLKKTGNEQEWKIKLQVLDPVPKPVIKIEKIEDMDDNCYLKLSCVIPGESVNYTWYGDKRPFPKELQNSVLETTLMPHNYSRCYTCQVSNSVSSKNGTVCLSPPCTLARS

SEQ ID NO: 6210 - protein, 133 aa, unidentified
  source 1..133: note = OX40L sequence
QVSHRYPRIQSIKVQFTEYKKEKGFILTSQKEDEIMKVQNNSVIINCDGFYLISLKGYFSQEVNISLHYQKDEEPLFQLKKVRSVNSLMVASLTYKDKVYLNVTTDNTSLDDFHVNGGELILIHQNPGEFCVL

SEQ ID NO: 6211 - protein, 149 aa, unidentified
  source 1..149: note = CD40L sequence
MQKGDQNPQIAAHVISEASSKTTSVLQWAEKGYYTMSNNLVTLENGKQLTVKRQGLYYIYAQVTFCSNREASSQAPFIASLCLKSPGRFERILLRAANTHSSAKPCGQQSIHLGGVFELQPGASVFVNVTDPSQVSHGTGFTSFGLLKL

SEQ ID NO: 6212 - protein, 205 aa, unidentified
  source 1..205: note = 41BB ligand sequence
ACPWAVSGARASPGSAASPRLREGPELSPDDPAGLLDLRQGMFAQLVAQNVLLIDGPLSWYSDPGLAGVSLTGGLSYKEDTKELVVAKAGVYYVFFQLELRRVVAGEGSGSVSLALHLQPLRSAAGAAALALTVDLPPASSEARNSAFGFQGRLLHLSAGQRLGVHLHTEARARHAWQLTQGATVLGLFRVTPEIPAGLPSPRSE

SEQ ID NO: 6213 - protein, 455 aa, synthetic construct
LNFRAPPVIPNVPFLWAWNAPSEFCLGKFDEPLDMSLFSFIGSPRINATGQGVTIFYVDRLGYYPYIDSITGVTVNGGIPQKISLQDHLDKAKKDITFYMPVDNLGMAVIDWEEWRPTWARNWKPKDVYKNRSIELVQQQNVQLSLTEATEKAKQEFEKAGKDFLVETIKLGKLLRPNHLWGYYLFPDCYNHHYKKPGYNGSCFNVEIKRNDDLSWLWNESTALYPSIYLNTQQSPVAATLYVRNRVREAIRVSKIPDAKSPLPVFAYTRIVFTDQVLKFLSQDELVYTFGETVALGASGIVIWGTLSIMRSMKSCLLLDNYMETILNPYIINVTLAAKMCSQVLCQEQGVCIRKNWNSSDYLHLNPDNFAIQLEKGGKFTVRGKPTLEDLEQFSEKFYCSCYSTLSCKEKADVKDTDAVDVCIADGVCIDAFLKPPMETEEPQIFYNASPSTLS

SEQ ID NO: 6214 - protein, 5 aa, synthetic construct
GGGGS

SEQ ID NO: 6215 - protein, 10 aa, synthetic construct
GGGGSGGGGS

SEQ ID NO: 6216 - protein, 15 aa, synthetic construct
GGGGSGGGGSGGGGS

SEQ ID NO: 6217 - protein, 17 aa, synthetic construct
DVPSGPGGGGGSGGGGS

SEQ ID NO: 6218 - protein, 413 aa, unidentified
  source 1..413: note = HYAL1 sequence
FRGPLLPNRPFTTVWNANTQWCLERHGVDVDVSVFDVVANPGQTFRGPDMTIFYSSQGTYPYYTPTGEPVFGGLPQNASLIAHLARTFQDILAAIPAPDFSGLAVIDWEAWRPRWAFNWDTKDIYRQRSRALVQAQHPDWPAPQVEAVAQDQFQGAARAWMAGTLQLGRALRPRGLWGFYGFPDCYNYDFLSPNYTGQCPSGIRAQNDQLGWLWGQSRALYPSIYMPAVLEGTGKSQMYVQHRVAEAFRVAVAAGDPNLPVLPYVQIFYDTTNHFLPLDELEHSLGESAAQGAAGVVLWVSWENTRTKESCQAIKEYMDTTLGPFILNVTSGALLCSQALCSGHGRCVRRTSHPKALLLLNPASFSIQLTPGGGPLSLRGALSLEDQAQMAVEFKCRCYPGWQAPWCERKSMW

SEQ ID NO: 6219 - protein, 551 aa, unidentified
  source 1..551: note = collagenase molecule IV sequence
YNFFPRKPKWDKNQITYRIIGYTPDLDPETVDDAFARAFQVWSDVTPLRFSRIHDGEADIMINFGRWEHGDGYPFDGKDGLLAHAFAPGTGVGGDSHFDDDELWTLGEGQVVRVKYGNADGEYCKFPFLFNGKEYNSCTDTGRSDGFLWCSTTYNFEKDGKYGFCPHEALFTMGGNAEGQPCKFPFRFQGTSYDSCTTEGRTDGYRWCGTTEDYDRDKKYGFCPETAMSTVGGNSEGAPCVFPFTFLGNKYESCTSAGRSDGKMWCATTANYDDDRKWGFCPDQGYSLFLVAAHEFGHAMGLEHSQDPGALMAPIYTYTKNFRLSQDDIKGIQELYGASPDIDLGTGPTPTLGPVTPEICKQDIVFDGIAQIRGEIFFFKDRFIWRTVTPRDKPMGPLLVATFWPELPEKIDAVYEAPQEEKAVFFAGNEYWIYSASTLERGYPKPLTSLGLPPDVQRVDAAFNWSKNKKTYIFAGDKFWRYNEVKKKMDPGFPKLIADAWNAIPDNLDAVVDLQGGGHSYFFKGAYYLKLENQSLKSVKFGSIKSDWLGC

SEQ ID NO: 6220 - protein, 14 aa, synthetic construct
AEAAAKEAAAKAAA

SEQ ID NO: 6221 - protein, 19 aa, synthetic construct
AEAAAKEAAAKEAAAKAAA

SEQ ID NO: 6222 - protein, 122 aa, synthetic construct
EIQLQQSGPELMKPGASLKISCKTSGYSFTSYYMHWVKQSHGQSLEWIGFIDPFKVITGYNHNFRGKATLTVDRSSTTAYMHLRSLTSEDSAVYYCARRYYSDYDGYALDYWGQGTSVTVSS

SEQ ID NO: 6223 - protein, 113 aa, synthetic construct
DVVMTQTPLSLPVSLGDQASIFCRSSQSLVHSDGNTYLHWYLQKPGQSPKLLIYKVSNRFSGVPDRFSGSGSGTDFTLKISRVEAEDLGVYFCSQSTHVPPYTFGGGTKLEIK

SEQ ID NO: 6224 - protein, 26 aa, synthetic construct
  VARIANT 1: note = Any amino acid except E
  VARIANT 5: note = Any amino acid except E
  VARIANT 9: note = Any amino acid except P
  VARIANT 11: note = Any amino acid except L
  VARIANT 12: note = Any amino acid except V
  VARIANT 14: note = Any amino acid except T
  VARIANT 20: note = Any amino acid except I
XVQLXQSGXEXXKXGASVKXSCKASG

SEQ ID NO: 6225 - protein, 122 aa, synthetic construct
EIQLVQSGAEVKKPGATVKISCKTSGYSFTSYYMHWVQQAPGKGLEWMGFIDPFKVITGYNHNFRGRVTITVDRSTTTAYMELSSLRSEDTAVYYCARRYYSDYDGYALDYWGQGTLVTVSS

SEQ ID NO: 6226 - protein, 14 aa, synthetic construct
  VARIANT 3: note = Any amino acid except K
  VARIANT 5: note = Any amino acid except S
  VARIANT 6: note = Any amino acid except H
  VARIANT 8: note = Any amino acid except K
  VARIANT 9: note = Any amino acid except S
  VARIANT 11: note = Any amino acid except E
  VARIANT 13: note = Any amino acid except I
WVXQXXGXXLXWXG

SEQ ID NO: 6227 - protein, 122 aa, synthetic construct
QIQLVQSGAEVKKTGSSVKVSCKTSGYSFTSYYMHWVRQAPGQALEWMGFIDPFKVITGYNHNFRGRVTITVDRSMTTAYMELSSLRSEDTAMYYCARRYYSDYDGYALDYWGQGTLVTVSS

SEQ ID NO: 6228 - protein, 31 aa, synthetic construct
  VARIANT 1: note = Any amino acid except K
  VARIANT 2: note = Any amino acid except A
  VARIANT 4: note = Any amino acid except F
  VARIANT 10: note = Any amino acid except S
  VARIANT 15: note = Any amino acid except M
  VARIANT 16: note = Any amino acid except Q
  VARIANT 17: note = Any amino acid except F
  VARIANT 18: note = Any amino acid except N
  VARIANT 21: note = Any amino acid except T
  VARIANT 23: note = Any amino acid except G
  VARIANT 25: note = Any amino acid except S
  VARIANT 27: note = Any amino acid except V
XXTXTVDTSXSTAYXXXXSLXSXDXAXYYCA

SEQ ID NO: 6229 - protein, 122 aa, synthetic construct
QIQLVQSGAEVKKPGASVKVSCKTSGYSFTSYYMHWVRQAPGQGLEWMGFIDPFKVITGYNHNFRGRVTSTVDRSITTAYMELSRLRSDDTVVYYCARRYYSDYDGYALDYWGQGTLVTVSS

SEQ ID NO: 6230 - protein, 11 aa, synthetic construct
  VARIANT 6: note = Any amino acid except S
WGQGTXVTVSS

SEQ ID NO: 6231 - protein, 113 aa, synthetic construct
EVVMTQSPGTLSLSPGERATLSCRSSQSLVHSDGNTYLHWYQQKPGQAPRLLIYKVSNRFSGIPDRFSGSGSGTDFTLTISRLEPEDFAVYFCSQSTHVPPYTFGGGTKVEIK

SEQ ID NO: 6232 - protein, 26 aa, synthetic construct
  VARIANT 1: note = Any amino acid except D
  VARIANT 3: note = Any amino acid except Q
  VARIANT 5: note = Any amino acid except Q
  VARIANT 10: note = Any amino acid except G
  VARIANT 14: note = Any amino acid except N
  VARIANT 15: note = Any amino acid except S
  VARIANT 16: note = Any amino acid except Q
  VARIANT 17: note = Any amino acid except S
  VARIANT 19: note = Any amino acid except S
  VARIANT 25: note = Any amino acid except T
XVXLXESGPXLVKXXXXLXLTCTVXG

SEQ ID NO: 6233 - protein, 113 aa, synthetic construct
EVVMTQSPATLSLSPGERATLSCRSSQSLVHSDGNTYLHWYQQKPGQAPRLLIYKVSNRFSGIPARFSGSGSGTDFTLTISSLEPEDFAVYFCSQSTHVPPYTFGGGTKVEIK

SEQ ID NO: 6234 - protein, 14 aa, synthetic construct
  VARIANT 5: note = Any amino acid except F
  VARIANT 8: note = Any amino acid except N
  VARIANT 9: note = Any amino acid except K
  VARIANT 13: note = Any amino acid except M
  VARIANT 14: note = Any amino acid except G
WIRQXPGXXLEWXX

SEQ ID NO: 6235 - protein, 113 aa, synthetic construct
EVVMTQSPATLSVSPGERATLSCRSSQSLVHSDGNTYLHWYQQKPGQAPRLLIYKVSNRFSGIPARFSGSGSGTEFTLTISSLQSEDFAVYFCSQSTHVPPYTFGGGTKVEIK

SEQ ID NO: 6236 - protein, 32 aa, synthetic construct
  VARIANT 2: note = Any amino acid except I
  VARIANT 6: note = Any amino acid except R
  VARIANT 11: note = Any amino acid except N
  VARIANT 13: note = Any amino acid except F
  VARIANT 14: note = Any amino acid except F
  VARIANT 16: note = Any amino acid except Q
  VARIANT 17: note = Any amino acid except L
  VARIANT 18: note = Any amino acid except N
  VARIANT 19: note = Any amino acid except S
  VARIANT 20: note = Any amino acid except V
  VARIANT 21: note = Any amino acid except T
  VARIANT 23: note = Any amino acid except E
RXSITXDTSKXQXXLXXXXXXPXDTATYYCAR

SEQ ID NO: 6237 - protein, 113 aa, synthetic construct
VVWMTQSPSLLSASTGDRVTISCRSSQSLVHSDGNTYLHWYQQKPGKAPELLIYKVSNRFSGVPSRFSGSGSGTDFTLTISCLQSEDFATYFCSQSTHVPPYTFGGGTKVEIK

SEQ ID NO: 6238 - protein, 23 aa, synthetic construct
  VARIANT 7: note = Any amino acid except T
  VARIANT 10: note = Any amino acid except T
  VARIANT 12: note = Any amino acid except S
  VARIANT 15: note = Any amino acid except I
DVVMTQXPLXLXVTXGQPASISC

SEQ ID NO: 6239 - protein, 7 aa, synthetic construct
FTSYYMH

SEQ ID NO: 6240 - protein, 15 aa, synthetic construct
  VARIANT 3: note = Any amino acid except L
  VARIANT 11: note = Any amino acid except K
WLXQRPGQSPXRLIY

SEQ ID NO: 6241 - protein, 17 aa, synthetic construct
FIDPFKVITGYNHNFRG

SEQ ID NO: 6242 - protein, 32 aa, synthetic construct
  VARIANT 7: note = Any amino acid except T
  VARIANT 27: note = Any amino acid except L
GVPDRFXGSGSGTDFTLKISRVEAEDXGVYHC

SEQ ID NO: 6243 - protein, 13 aa, synthetic construct
RYYSDYDGYALDY

SEQ ID NO: 6244 - protein, 10 aa, synthetic construct
  VARIANT 7: note = Any amino acid except L
FGGGTKXEIK

SEQ ID NO: 6245 - protein, 16 aa, synthetic construct
RSSQSLVHSDGNTYLH

SEQ ID NO: 6246 - protein, 10 aa, synthetic construct
SQSTHVPPYT

SEQ ID NO: 6247 - protein, 113 aa, synthetic construct
QVQLVQSGAEVKKPGASVKVSCKASGYSFTGYYIHWVRQAPGQELGWMGYISCYNGASSYNQKFKGRVTMTVDTSISTAYTELSSLRSEDTATYYCASSMDYWGQGTLVTVSS

SEQ ID NO: 6248 - protein, 117 aa, synthetic construct
QVTLKESGPVLVKPTETLTLTCTVSGYSITSDYAWNWIRQPPGKALEWLAYISYSGSTSYNPSLKSRLSITKDTSKSQVVLTMTNMDPVDTATYYCARDPPYYYGSWGQGTTVTVSS

SEQ ID NO: 6249 - protein, 112 aa, synthetic construct
DVVMTQSPLSLPVTLGQPASISCKSSQSLLDSDGKTYLNWLQQRPGQSPRRLIYLVSKLDSGVPDRFSGSGSGTDFTLKISRVEAEDVGVYHCWQGTHFPYTFGGGTKVEIK

SEQ ID NO: 6250 - protein, 113 aa, synthetic construct
EVQLEQSGPELVKTGASVKISCKASGYSFTGYYIHWVKQSHGKSLEWIGYISCYNGASSYNQKFKGKATFTVDTSSSTAYMQFNSLTSGDSAVYYCASSMDYWGQGTSVTVSS

SEQ ID NO: 6251 - protein, 120 aa, synthetic construct
DVQLQESGPGLVKNSQSLSLTCTVTGYSITSDYAWNWIRQFPGNKLEWMGYISYSGSTSYNPSLKSRISITRDTSKNQFFLQLNSVTPEDTATYYCARDPPYYYGSNGTWGQGTSVTVSS

SEQ ID NO: 6252 - protein, 112 aa, synthetic construct
DVVMTQTPLTLSVTIGQPASISCKSSQSLLDSDGKTYLNWLLQRPGQSPKRLIYLVSKLDSGVPDRFTGSGSGTDFTLKISRVEAEDLGVYHCWQGTHFPYTFGGGTKLEIK

SEQ ID NO: 6253 - protein, 9 aa, synthetic construct
YSFTGYYIH

SEQ ID NO: 6254 - protein, 17 aa, synthetic construct
YISCYNGASSYNQKFKG

SEQ ID NO: 6255 - protein, 5 aa, synthetic construct
SSMDY

SEQ ID NO: 6256 - protein, 10 aa, synthetic construct
YSITSDYAWN

SEQ ID NO: 6257 - protein, 16 aa, synthetic construct
YISYSGSTSYNPSLKS

SEQ ID NO: 6258 - protein, 8 aa, synthetic construct
DPPYYYGS

SEQ ID NO: 6259 - protein, 16 aa, synthetic construct
KSSQSLLDSDGKTYLN

SEQ ID NO: 6260 - protein, 7 aa, synthetic construct
LVSKLDS

SEQ ID NO: 6261 - protein, 9 aa, synthetic construct
WQGTHFPYT

SEQ ID NO: 6262 - protein, 11 aa, synthetic construct
DPPYYYGSNGT

SEQ ID NO: 6263 - protein, 26 aa, synthetic construct
QVQLVQSGAEVKKPGASVKVSCKASG

SEQ ID NO: 6264 - protein, 14 aa, synthetic construct
WVRQAPGQELGWMG

SEQ ID NO: 6265 - protein, 31 aa, synthetic construct
RVTMTVDTSISTAYTELSSLRSEDTATYYCA

SEQ ID NO: 6266 - protein, 26 aa, synthetic construct
QVTLKESGPVLVKPTETLTLTCTVSG

SEQ ID NO: 6267 - protein, 14 aa, synthetic construct
WIRQPPGKALEWLA

SEQ ID NO: 6268 - protein, 32 aa, synthetic construct
RLSITKDTSKSQVVLTMTNMDPVDTATYYCAR

SEQ ID NO: 6269 - protein, 11 aa, synthetic construct
WGQGTTVTVSS

SEQ ID NO: 6270 - protein, 26 aa, synthetic construct
EVQLEQSGPELVKTGASVKISCKASG

SEQ ID NO: 6271 - protein, 14 aa, synthetic construct
WVKQSHGKSLEWIG

SEQ ID NO: 6272 - protein, 31 aa, synthetic construct
KATFTVDTSSSTAYMQFNSLTSGDSAVYYCA

SEQ ID NO: 6273 - protein, 11 aa, synthetic construct
WGQGTSVTVSS

SEQ ID NO: 6274 - protein, 26 aa, synthetic construct
DVQLQESGPGLVKNSQSLSLTCTVTG

SEQ ID NO: 6275 - protein, 14 aa, synthetic construct
WIRQFPGNKLEWMG

SEQ ID NO: 6276 - protein, 32 aa, synthetic construct
RISITRDTSKNQFFLQLNSVTPEDTATYYCAR

SEQ ID NO: 6277 - protein, 23 aa, synthetic construct
DVVMTQSPLSLPVTLGQPASISC

SEQ ID NO: 6278 - protein, 15 aa, synthetic construct
WLQQRPGQSPRRLIY

SEQ ID NO: 6279 - protein, 32 aa, synthetic construct
GVPDRFSGSGSGTDFTLKISRVEAEDVGVYHC

SEQ ID NO: 6280 - protein, 10 aa, synthetic construct
FGGGTKVEIK

SEQ ID NO: 6281 - protein, 23 aa, synthetic construct
DVVMTQTPLTLSVTIGQPASISC

SEQ ID NO: 6282 - protein, 15 aa, synthetic construct
WLLQRPGQSPKRLIY

SEQ ID NO: 6283 - protein, 32 aa, synthetic construct
GVPDRFTGSGSGTDFTLKISRVEAEDLGVYHC

SEQ ID NO: 6284 - protein, 10 aa, synthetic construct
FGGGTKLEIK

SEQ ID NO: 6285 - protein, 400 aa, Homo sapiens
EPAVYFKEQFLDGDGWTSRWIESKHKSDFGKFVLSSGKFYGDEEKDKGLQTSQDARFYALSASFEPFSNKGQTLVVQFTVKHEQNIDCGGGYVKLFPNSLDQTDMHGDSEYNIMFGPDICGPGTKKVHVIFNYKGKNVLINKDIRCKDDEFTHLYTLIVRPDNTYEVKIDNSQVESGSLEDDWDFLPPKKIKDPDASKPEDWDERAKIDDPTDSKPEDWDKPEHIPDPDAKKPEDWDEEMDGEWEPPVIQNPEYKGEWKPRQIDNPDYKGTWIHPEIDNPEYSPDPSIYAYDNFGVLGLDLWQVKSGTIFDNFLITNDEAYAEEFGNETWGVTKAAEKQMKDKQDEEQRLKEEEEDKKRKEEEEAEDKEDDEDKDEDEEDEEDKEEDEEEDVPGQAKDEL

SEQ ID NO: 6286 - protein, 24 aa, synthetic construct
RRKMSPARPRTSCREACLQGWTEA

SEQ ID NO: 6287 - protein, 45 aa, synthetic construct
TRRMMRTKMRMRRMRRTRRKMRRKMSPARPRTSCREACLQGWTEA

SEQ ID NO: 6288 - protein, 46 aa, synthetic construct
NCRRMMRTKMRMRRMRRTRRKMRRKMSPARPRTSCREACLQGWTEA

SEQ ID NO: 6289 - protein, 47 aa, synthetic construct
QRTRRMMRTKMRMRRMRRTRRKMRRKMSPARPRTSCREACLQGWTEA

SEQ ID NO: 6290 - protein, 50 aa, synthetic construct
RRRQRTRRMMRTKMRMRRMRRTRRKMRRKMSPARPRTSCREACLQGWTEA

SEQ ID NO: 6291 - protein, 48 aa, synthetic construct
GQRTRRMMRTKMRMRRMRRTRRKMRRKMSPARPRTSCREACLQGWTEA

SEQ ID NO: 6292 - protein, 49 aa, synthetic construct
RRQRTRRMMRTKMRMRRMRRTRRKMRRKMSPARPRTSCREACLQGWTEA

SEQ ID NO: 6293 - protein, 44 aa, synthetic construct
RRMMRTKMRMRRMRRTRRKMRRKMSPARPRTSCREACLQGWTEA

SEQ ID NO: 6294 - protein, 48 aa, synthetic construct
RQRTRRMMRTKMRMRRMRRTRRKMRRKMSPARPRTSCREACLQGWTEA

SEQ ID NO: 6295 - protein, 46 aa, synthetic construct
MCRRMMRTKMRMRRMRRTRRKMRRKMSPARPRTSCREACLQGWTEA

SEQ ID NO: 6296 - protein, 50 aa, synthetic construct
DQRQRTRRMMRTKMRMRRMRRTRRKMRRKMSPARPRTSCREACLQGWTEA

SEQ ID NO: 6297 - protein, 51 aa, synthetic construct
QRRRQRTRRMMRTKMRMRRMRRTRRKMRRKMSPARPRTSCREACLQGWTEA

SEQ ID NO: 6298 - protein, 50 aa, synthetic construct
RRRERTRRMMRTKMRMRRMRRTRRKMRRKMSPARPRTSCREACLQGWTEA

SEQ ID NO: 6299 - protein, 50 aa, synthetic construct
QRRQRTRRMMRTKMRMRRMRRTRRKMRRKMSPARPRTSCREACLQGWTEA

SEQ ID NO: 6300 - protein, 49 aa, synthetic construct
RRQWTRRMMRTKMRMRRMRRTRRKMRRKMSPARPRTSCREACLQGWTEA

SEQ ID NO: 6301 - protein, 43 aa, synthetic construct
RMMRTKMRMRRMRRTRRKMRRKMSPARPRTSCREACLQGWTEA

SEQ ID NO: 6302 - protein, 50 aa, synthetic construct
GRRQRTRRMMRTKMRMRRMRRTRRKMRRKMSPARPRTSCREACLQGWTEA

SEQ ID NO: 6303 - protein, 49 aa, synthetic construct
AFKRTRRMMRTKMRMRRMRRTRRKMRRKMSPARPRTSCREACLQGWTEA

SEQ ID NO: 6304 - protein, 54 aa, synthetic construct
NAKRRRRQRTRRMMRTKMRMRRMRRTRRKMRRKMSPARPRTSCREACLQGWTEA

SEQ ID NO: 6305 - protein, 53 aa, synthetic construct
CVRRRRQRTRRMMRTKMRMRRMRRTRRKMRRKMSPARPRTSCREACLQGWTEA

SEQ ID NO: 6306 - protein, 55 aa, synthetic construct
CFAKRRRRQRTRRMMRTKMRMRRMRRTRRKMRRKMSPARPRTSCREACLQGWTEA

SEQ ID NO: 6307 - protein, 49 aa, synthetic construct
PPLCLRRMMRTKMRMRRMRRTRRKMRRKMSPARPRTSCREACLQGWTEA

SEQ ID NO: 6308 - protein, 48 aa, synthetic construct
DHPCRRMMRTKMRMRRMRRTRRKMRRKMSPARPRTSCREACLQGWTEA

SEQ ID NO: 6309 - protein, 47 aa, synthetic construct
GNCRRMMRTKMRMRRMRRTRRKMRRKMSPARPRTSCREACLQGWTEA

SEQ ID NO: 6310 - protein, 45 aa, synthetic construct
CRRMMRTKMRMRRMRRTRRKMRRKMSPARPRTSCREACLQGWTEA

SEQ ID NO: 6311 - protein, 46 aa, synthetic construct
TCRRMMRTKMRMRRMRRTRRKMRRKMSPARPRTSCREACLQGWTEA

SEQ ID NO: 6312 - protein, 46 aa, synthetic construct
ICRRMMRTKMRMRRMRRTRRKMRRKMSPARPRTSCREACLQGWTEA

SEQ ID NO: 6313 - protein, 394 aa, synthetic construct
EPAVYFKEQFLDGDGWTSRWIESKHKSDFGKFVLSSGKFYGDEEKDKGLQTSQDARFYALSASFEPFSNKGQTLVVQFTVKHEQNIDCGGGYVKLFPNSLDQTDMHGDSEYNIMFGPDICGPGTKKVHVIFNYKGKNVLINKDIRCKDDEFTHLYTLIVRPDNTYEVKIDNSQVESGSLEDDWDFLPPKKIKDPDASKPEDWDERAKIDDPTDSKPEDWDKPEHIPDPDAKKPEDWDEEMDGEWEPPVIQNPEYKGEWKPRQIDNPDYKGTWIHPEIDNPEYSPDPSIYAYDNFGVLGLDLWQVKSGTIFDNFLITNDEAYAEEFGNETWGVTKAAEKQMKDKQDEEQRTRRMMRTKMRMRRMRRTRRKMRRKMSPARPRTSCREACLQGWTEA

SEQ ID NO: 6314 - protein, 413 aa, synthetic construct
EPAVYFKEQFLDGDGWTSRWIESKHKSDFGKFVLSSGKFYGDEEKDKGLQTSQDARFYALSASFEPFSNKGQTLVVQFTVKHEQNIDCGGGYVKLFPNSLDQTDMHGDSEYNIMFGPDICGPGTKKVHVIFNYKGKNVLINKDIRCKDDEFTHLYTLIVRPDNTYEVKIDNSQVESGSLEDDWDFLPPKKIKDPDASKPEDWDERAKIDDPTDSKPEDWDKPEHIPDPDAKKPEDWDEEMDGEWEPPVIQNPEYKGEWKPRQIDNPDYKGTWIHPEIDNPEYSPDPSIYAYDNFGVLGLDLWQVKSGTIFDNFLITNDEAYAEEFGNETWGVTKAAEKQMKDKQDEEQRLKEEEEDKKRKEEEEAEDNCRRMMRTKMRMRRMRRTRRKMRRKMSPARPRTSCREACLQGWTEA

SEQ ID NO: 6315 - protein, 396 aa, synthetic construct
EPAVYFKEQFLDGDGWTSRWIESKHKSDFGKFVLSSGKFYGDEEKDKGLQTSQDARFYALSASFEPFSNKGQTLVVQFTVKHEQNIDCGGGYVKLFPNSLDQTDMHGDSEYNIMFGPDICGPGTKKVHVIFNYKGKNVLINKDIRCKDDEFTHLYTLIVRPDNTYEVKIDNSQVESGSLEDDWDFLPPKKIKDPDASKPEDWDERAKIDDPTDSKPEDWDKPEHIPDPDAKKPEDWDEEMDGEWEPPVIQNPEYKGEWKPRQIDNPDYKGTWIHPEIDNPEYSPDPSIYAYDNFGVLGLDLWQVKSGTIFDNFLITNDEAYAEEFGNETWGVTKAAEKQMKDKQDEEQRQRTRRMMRTKMRMRRMRRTRRKMRRKMSPARPRTSCREACLQGWTEA

SEQ ID NO: 6316 - protein, 400 aa, synthetic construct
EPAVYFKEQFLDGDGWTSRWIESKHKSDFGKFVLSSGKFYGDEEKDKGLQTSQDARFYALSASFEPFSNKGQTLVVQFTVKHEQNIDCGGGYVKLFPNSLDQTDMHGDSEYNIMFGPDICGPGTKKVHVIFNYKGKNVLINKDIRCKDDEFTHLYTLIVRPDNTYEVKIDNSQVESGSLEDDWDFLPPKKIKDPDASKPEDWDERAKIDDPTDSKPEDWDKPEHIPDPDAKKPEDWDEEMDGEWEPPVIQNPEYKGEWKPRQIDNPDYKGTWIHPEIDNPEYSPDPSIYAYDNFGVLGLDLWQVKSGTIFDNFLITNDEAYAEEFGNETWGVTKAAEKQMKDKQDEEQRLRRRQRTRRMMRTKMRMRRMRRTRRKMRRKMSPARPRTSCREACLQGWTEA

SEQ ID NO: 6317 - protein, 394 aa, synthetic construct
EPAVYFKEQFLDGDGWTSRWIESKHKSDFGKFVLSSGKFYGDEEKDKGLQTSQDARFYALSASFEPFSNKGQTLVVQFTVKHEQNIDCGGGYVKLFPNSLDQTDMHGDSEYNIMFGPDICGPGTKKVHVIFNYKGKNVLINKDIRCKDDEFTHLYTLIVRPDNTYEVKIDNSQVESGSLEDDWDFLPPKKIKDPDASKPEDWDERAKIDDPTDSKPEDWDKPEHIPDPDAKKPEDWDEEMDGEWEPPVIQNPEYKGEWKPRQIDNPDYKGTWIHPEIDNPEYSPDPSIYAYDNFGVLGLDLWQVKSGTIFDNFLITNDEAYAEEFGNETWGVTKAAEKQMKDKQDEGQRTRRMMRTKMRMRRMRRTRRKMRRKMSPARPRTSCREACLQGWTEA

SEQ ID NO: 6318 - protein, 396 aa, synthetic construct
EPAVYFKEQFLDGDGWTSRWIESKHKSDFGKFVLSSGKFYGDEEKDKGLQTSQDARFYALSASFEPFSNKGQTLVVQFTVKHEQNIDCGGGYVKLFPNSLDQTDMHGDSEYNIMFGPDICGPGTKKVHVIFNYKGKNVLINKDIRCKDDEFTHLYTLIVRPDNTYEVKIDNSQVESGSLEDDWDFLPPKKIKDPDASKPEDWDERAKIDDPTDSKPEDWDKPEHIPDPDAKKPEDWDEEMDGEWEPPVIQNPEYKGEWKPRQIDNPDYKGTWIHPEIDNPEYSPDPSIYAYDNFGVLGLDLWQVKSGTIFDNFLITNDEAYAEEFGNETWGVTKAAEKQMKDKQDEERRQRTRRMMRTKMRMRRMRRTRRKMRRKMSPARPRTSCREACLQGWTEA

SEQ ID NO: 6319 - protein, 394 aa, synthetic construct
EPAVYFKEQFLDGDGWTSRWIESKHKSDFGKFVLSSGKFYGDEEKDKGLQTSQDARFYALSASFEPFSNKGQTLVVQFTVKHEQNIDCGGGYVKLFPNSLDQTDMHGDSEYNIMFGPDICGPGTKKVHVIFNYKGKNVLINKDIRCKDDEFTHLYTLIVRPDNTYEVKIDNSQVESGSLEDDWDFLPPKKIKDPDASKPEDWDERAKIDDPTDSKPEDWDKPEHIPDPDAKKPEDWDEEMDGEWEPPVIQNPEYKGEWKPRQIDNPDYKGTWIHPEIDNPEYSPDPSIYAYDNFGVLGLDLWQVKSGTIFDNFLITNDEAYAEEFGNETWGVTKAAEKQMKDKQDEEQRLRRMMRTKMRMRRMRRTRRKMRRKMSPARPRTSCREACLQGWTEA

SEQ ID NO: 6320 - protein, 400 aa, synthetic construct
EPAVYFKEQFLDGDGWTSRWIESKHKSDFGKFVLSSGKFYGDEEKDKGLQTSQDARFYALSASFEPFSNKGQTLVVQFTVKHEQNIDCGGGYVKLFPNSLDQTDMHGDSEYNIMFGPDICGPGTKKVHVIFNYKGKNVLINKDIRCKDDEFTHLYTLIVRPDNTYEVKIDNSQVESGSLEDDWDFLPPKKIKDPDASKPEDWDERAKIDDPTDSKPEDWDKPEHIPDPDAKKPEDWDEEMDGEWEPPVIQNPEYKGEWKPRQIDNPDYKGTWIHPEIDNPEYSPDPSIYAYDNFGVLGLDLWQVKSGTIFDNFLITNDEAYAEEFGNETWGVTKAAEKQMKDKQDEEQRLKRRQRTRRMMRTKMRMRRMRRTRRKMRRKMSPARPRTSCREACLQGWTEA

SEQ ID NO: 6321 - protein, 411 aa, synthetic construct
EPAVYFKEQFLDGDGWTSRWIESKHKSDFGKFVLSSGKFYGDEEKDKGLQTSQDARFYALSASFEPFSNKGQTLVVQFTVKHEQNIDCGGGYVKLFPNSLDQTDMHGDSEYNIMFGPDICGPGTKKVHVIFNYKGKNVLINKDIRCKDDEFTHLYTLIVRPDNTYEVKIDNSQVESGSLEDDWDFLPPKKIKDPDASKPEDWDERAKIDDPTDSKPEDWDKPEHIPDPDAKKPEDWDEEMDGEWEPPVIQNPEYKGEWKPRQIDNPDYKGTWIHPEIDNPEYSPDPSIYAYDNFGVLGLDLWQVKSGTIFDNFLITNDEAYAEEFGNETWGVTKAAEKQMKDKQDEEQRLKEEEEDKKRKEEERQRTRRMMRTKMRMRRMRRTRRKMRRKMSPARPRTSCREACLQGWTEA

SEQ ID NO: 6322 - protein, 413 aa, synthetic construct
EPAVYFKEQFLDGDGWTSRWIESKHKSDFGKFVLSSGKFYGDEEKDKGLQTSQDARFYALSASFEPFSNKGQTLVVQFTVKHEQNIDCGGGYVKLFPNSLDQTDMHGDSEYNIMFGPDICGPGTKKVHVIFNYKGKNVLINKDIRCKDDEFTHLYTLIVRPDNTYEVKIDNSQVESGSLEDDWDFLPPKKIKDPDASKPEDWDERAKIDDPTDSKPEDWDKPEHIPDPDAKKPEDWDEEMDGEWEPPVIQNPEYKGEWKPRQIDNPDYKGTWIHPEIDNPEYSPDPSIYAYDNFGVLGLDLWQVKSGTIFDNFLITNDEAYAEEFGNETWGVTKAAEKQMKDKQDEEQRLKEEEEDKKRKEEEEAEDMCRRMMRTKMRMRRMRRTRRKMRRKMSPARPRTSCREACLQGWTEA

SEQ ID NO: 6323 - protein, 396 aa, synthetic construct
EPAVYFKEQFLDGDGWTSRWIESKHKSDFGKFVLSSGKFYGDEEKDKGLQTSQDARFYALSASFEPFSNKGQTLVVQFTVKHEQNIDCGGGYVKLFPNSLDQTDMHGDSEYNIMFGPDICGPGTKKVHVIFNYKGKNVLINKDIRCKDDEFTHLYTLIVRPDNTYEVKIDNSQVESGSLEDDWDFLPPKKIKDPDASKPEDWDERAKIDDPTDSKPEDWDKPEHIPDPDAKKPEDWDEEMDGEWEPPVIQNPEYKGEWKPRQIDNPDYKGTWIHPEIDNPEYSPDPSIYAYDNFGVLGLDLWQVKSGTIFDNFLITNDEAYAEEFGNETWGVTKAAEKQMKDKQDEDQRQRTRRMMRTKMRMRRMRRTRRKMRRKMSPARPRTSCREACLQGWTEA

SEQ ID NO: 6324 - protein, 400 aa, synthetic construct
EPAVYFKEQFLDGDGWTSRWIESKHKSDFGKFVLSSGKFYGDEEKDKGLQTSQDARFYALSASFEPFSNKGQTLVVQFTVKHEQNIDCGGGYVKLFPNSLDQTDMHGDSEYNIMFGPDICGPGTKKVHVIFNYKGKNVLINKDIRCKDDEFTHLYTLIVRPDNTYEVKIDNSQVESGSLEDDWDFLPPKKIKDPDASKPEDWDERAKIDDPTDSKPEDWDKPEHIPDPDAKKPEDWDEEMDGEWEPPVIQNPEYKGEWKPRQIDNPDYKGTWIHPEIDNPEYSPDPSIYAYDNFGVLGLDLWQVKSGTIFDNFLITNDEAYAEEFGNETWGVTKAAEKQMKDKQDEEQRRRRRQRTRRMMRTKMRMRRMRRTRRKMRRKMSPARPRTSCREACLQGWTEA

SEQ ID NO: 6325 - protein, 400 aa, synthetic construct
EPAVYFKEQFLDGDGWTSRWIESKHKSDFGKFVLSSGKFYGDEEKDKGLQTSQDARFYALSASFEPFSNKGQTLVVQFTVKHEQNIDCGGGYVKLFPNSLDQTDMHGDSEYNIMFGPDICGPGTKKVHVIFNYKGKNVLINKDIRCKDDEFTHLYTLIVRPDNTYEVKIDNSQVESGSLEDDWDFLPPKKIKDPDASKPEDWDERAKIDDPTDSKPEDWDKPEHIPDPDAKKPEDWDEEMDGEWEPPVIQNPEYKGEWKPRQIDNPDYKGTWIHPEIDNPEYSPDPSIYAYDNFGVLGLDLWQVKSGTIFDNFLITNDEAYAEEFGNETWGVTKAAEKQMKDKQDEEQRQRRRQRTRRMMRTKMRMRRMRRTRRKMRRKMSPARPRTSCREACLQGWTEA

SEQ ID NO: 6326 - protein, 400 aa, synthetic construct
EPAVYFKEQFLDGDGWTSRWIESKHKSDFGKFVLSSGKFYGDEEKDKGLQTSQDARFYALSASFEPFSNKGQTLVVQFTVKHEQNIDCGGGYVKLFPNSLDQTDMHGDSEYNIMFGPDICGPGTKKVHVIFNYKGKNVLINKDIRCKDDEFTHLYTLIVRPDNTYEVKIDNSQVESGSLEDDWDFLPPKKIKDPDASKPEDWDERAKIDDPTDSKPEDWDKPEHIPDPDAKKPEDWDEEMDGEWEPPVIQNPEYKGEWKPRQIDNPDYKGTWIHPEIDNPEYSPDPSIYAYDNFGVLGLDLWQVKSGTIFDNFLITNDEAYAEEFGNETWGVTKAAEKQMKDKQDEEQRLRRRERTRRMMRTKMRMRRMRRTRRKMRRKMSPARPRTSCREACLQGWTEA

SEQ ID NO: 6327 - protein, 400 aa, synthetic construct
EPAVYFKEQFLDGDGWTSRWIESKHKSDFGKFVLSSGKFYGDEEKDKGLQTSQDARFYALSASFEPFSNKGQTLVVQFTVKHEQNIDCGGGYVKLFPNSLDQTDMHGDSEYNIMFGPDICGPGTKKVHVIFNYKGKNVLINKDIRCKDDEFTHLYTLIVRPDNTYEVKIDNSQVESGSLEDDWDFLPPKKIKDPDASKPEDWDERAKIDDPTDSKPEDWDKPEHIPDPDAKKPEDWDEEMDGEWEPPVIQNPEYKGEWKPRQIDNPDYKGTWIHPEIDNPEYSPDPSIYAYDNFGVLGLDLWQVKSGTIFDNFLITNDEAYAEEFGNETWGVTKAAEKQMKDKQDEEQRLQRRQRTRRMMRTKMRMRRMRRTRRKMRRKMSPARPRTSCREACLQGWTEA

SEQ ID NO: 6328 - protein, 400 aa, synthetic construct
EPAVYFKEQFLDGDGWTSRWIESKHKSDFGKFVLSSGKFYGDEEKDKGLQTSQDARFYALSASFEPFSNKGQTLVVQFTVKHEQNIDCGGGYVKLFPNSLDQTDMHGDSEYNIMFGPDICGPGTKKVHVIFNYKGKNVLINKDIRCKDDEFTHLYTLIVRPDNTYEVKIDNSQVESGSLEDDWDFLPPKKIKDPDASKPEDWDERAKIDDPTDSKPEDWDKPEHIPDPDAKKPEDWDEEMDGEWEPPVIQNPEYKGEWKPRQIDNPDYKGTWIHPEIDNPEYSPDPSIYAYDNFGVLGLDLWQVKSGTIFDNFLITNDEAYAEEFGNETWGVTKAAEKQMKDKQDEEQRLKRRQWTRRMMRTKMRMRRMRRTRRKMRRKMSPARPRTSCREACLQGWTEA

SEQ ID NO: 6329 - protein, 394 aa, synthetic construct
EPAVYFKEQFLDGDGWTSRWIESKHKSDFGKFVLSSGKFYGDEEKDKGLQTSQDARFYALSASFEPFSNKGQTLVVQFTVKHEQNIDCGGGYVKLFPNSLDQTDMHGDSEYNIMFGPDICGPGTKKVHVIFNYKGKNVLINKDIRCKDDEFTHLYTLIVRPDNTYEVKIDNSQVESGSLEDDWDFLPPKKIKDPDASKPEDWDERAKIDDPTDSKPEDWDKPEHIPDPDAKKPEDWDEEMDGEWEPPVIQNPEYKGEWKPRQIDNPDYKGTWIHPEIDNPEYSPDPSIYAYDNFGVLGLDLWQVKSGTIFDNFLITNDEAYAEEFGNETWGVTKAAEKQMKDKQDEEQRLKRMMRTKMRMRRMRRTRRKMRRKMSPARPRTSCREACLQGWTEA

SEQ ID NO: 6330 - protein, 401 aa, synthetic construct
EPAVYFKEQFLDGDGWTSRWIESKHKSDFGKFVLSSGKFYGDEEKDKGLQTSQDARFYALSASFEPFSNKGQTLVVQFTVKHEQNIDCGGGYVKLFPNSLDQTDMHGDSEYNIMFGPDICGPGTKKVHVIFNYKGKNVLINKDIRCKDDEFTHLYTLIVRPDNTYEVKIDNSQVESGSLEDDWDFLPPKKIKDPDASKPEDWDERAKIDDPTDSKPEDWDKPEHIPDPDAKKPEDWDEEMDGEWEPPVIQNPEYKGEWKPRQIDNPDYKGTWIHPEIDNPEYSPDPSIYAYDNFGVLGLDLWQVKSGTIFDNFLITNDEAYAEEFGNETWGVTKAAEKQMKDKQDEEQRLKEERQRTRRMMRTKMRMRRMRRTRRKMRRKMSPARPRTSCREACLQGWTEA

SEQ ID NO: 6331 - protein, 405 aa, synthetic construct
EPAVYFKEQFLDGDGWTSRWIESKHKSDFGKFVLSSGKFYGDEEKDKGLQTSQDARFYALSASFEPFSNKGQTLVVQFTVKHEQNIDCGGGYVKLFPNSLDQTDMHGDSEYNIMFGPDICGPGTKKVHVIFNYKGKNVLINKDIRCKDDEFTHLYTLIVRPDNTYEVKIDNSQVESGSLEDDWDFLPPKKIKDPDASKPEDWDERAKIDDPTDSKPEDWDKPEHIPDPDAKKPEDWDEEMDGEWEPPVIQNPEYKGEWKPRQIDNPDYKGTWIHPEIDNPEYSPDPSIYAYDNFGVLGLDLWQVKSGTIFDNFLITNDEAYAEEFGNETWGVTKAAEKQMKDKQDEEQRLKEEEEGRRQRTRRMMRTKMRMRRMRRTRRKMRRKMSPARPRTSCREACLQGWTEA

SEQ ID NO: 6332 - protein, 404 aa, synthetic construct
EPAVYFKEQFLDGDGWTSRWIESKHKSDFGKFVLSSGKFYGDEEKDKGLQTSQDARFYALSASFEPFSNKGQTLVVQFTVKHEQNIDCGGGYVKLFPNSLDQTDMHGDSEYNIMFGPDICGPGTKKVHVIFNYKGKNVLINKDIRCKDDEFTHLYTLIVRPDNTYEVKIDNSQVESGSLEDDWDFLPPKKIKDPDASKPEDWDERAKIDDPTDSKPEDWDKPEHIPDPDAKKPEDWDEEMDGEWEPPVIQNPEYKGEWKPRQIDNPDYKGTWIHPEIDNPEYSPDPSIYAYDNFGVLGLDLWQVKSGTIFDNFLITNDEAYAEEFGNETWGVTKAAEKQMKDKQDEEQRLKEEEEAFKRTRRMMRTKMRMRRMRRTRRKMRRKMSPARPRTSCREACLQGWTEA

SEQ ID NO: 6333 - protein, 410 aa, synthetic construct
EPAVYFKEQFLDGDGWTSRWIESKHKSDFGKFVLSSGKFYGDEEKDKGLQTSQDARFYALSASFEPFSNKGQTLVVQFTVKHEQNIDCGGGYVKLFPNSLDQTDMHGDSEYNIMFGPDICGPGTKKVHVIFNYKGKNVLINKDIRCKDDEFTHLYTLIVRPDNTYEVKIDNSQVESGSLEDDWDFLPPKKIKDPDASKPEDWDERAKIDDPTDSKPEDWDKPEHIPDPDAKKPEDWDEEMDGEWEPPVIQNPEYKGEWKPRQIDNPDYKGTWIHPEIDNPEYSPDPSIYAYDNFGVLGLDLWQVKSGTIFDNFLITNDEAYAEEFGNETWGVTKAAEKQMKDKQDEEQRLKEEEEDNAKRRRRQRTRRMMRTKMRMRRMRRTRRKMRRKMSPARPRTSCREACLQGWTEA

SEQ ID NO: 6334 - protein, 409 aa, synthetic construct
EPAVYFKEQFLDGDGWTSRWIESKHKSDFGKFVLSSGKFYGDEEKDKGLQTSQDARFYALSASFEPFSNKGQTLVVQFTVKHEQNIDCGGGYVKLFPNSLDQTDMHGDSEYNIMFGPDICGPGTKKVHVIFNYKGKNVLINKDIRCKDDEFTHLYTLIVRPDNTYEVKIDNSQVESGSLEDDWDFLPPKKIKDPDASKPEDWDERAKIDDPTDSKPEDWDKPEHIPDPDAKKPEDWDEEMDGEWEPPVIQNPEYKGEWKPRQIDNPDYKGTWIHPEIDNPEYSPDPSIYAYDNFGVLGLDLWQVKSGTIFDNFLITNDEAYAEEFGNETWGVTKAAEKQMKDKQDEEQRLKEEEEDCVRRRRQRTRRMMRTKMRMRRMRRTRRKMRRKMSPARPRTSCREACLQGWTEA

SEQ ID NO: 6335 - protein, 405 aa, synthetic construct
EPAVYFKEQFLDGDGWTSRWIESKHKSDFGKFVLSSGKFYGDEEKDKGLQTSQDARFYALSASFEPFSNKGQTLVVQFTVKHEQNIDCGGGYVKLFPNSLDQTDMHGDSEYNIMFGPDICGPGTKKVHVIFNYKGKNVLINKDIRCKDDEFTHLYTLIVRPDNTYEVKIDNSQVESGSLEDDWDFLPPKKIKDPDASKPEDWDERAKIDDPTDSKPEDWDKPEHIPDPDAKKPEDWDEEMDGEWEPPVIQNPEYKGEWKPRQIDNPDYKGTWIHPEIDNPEYSPDPSIYAYDNFGVLGLDLWQVKSGTIFDNFLITNDEAYAEEFGNETWGVTKAAEKQMKDKQDEEQRLKEEEEDRRQRTRRMMRTKMRMRRMRRTRRKMRRKMSPARPRTSCREACLQGWTEA

SEQ ID NO: 6336 - protein, 405 aa, synthetic construct
EPAVYFKEQFLDGDGWTSRWIESKHKSDFGKFVLSSGKFYGDEEKDKGLQTSQDARFYALSASFEPFSNKGQTLVVQFTVKHEQNIDCGGGYVKLFPNSLDQTDMHGDSEYNIMFGPDICGPGTKKVHVIFNYKGKNVLINKDIRCKDDEFTHLYTLIVRPDNTYEVKIDNSQVESGSLEDDWDFLPPKKIKDPDASKPEDWDERAKIDDPTDSKPEDWDKPEHIPDPDAKKPEDWDEEMDGEWEPPVIQNPEYKGEWKPRQIDNPDYKGTWIHPEIDNPEYSPDPSIYAYDNFGVLGLDLWQVKSGTIFDNFLITNDEAYAEEFGNETWGVTKAAEKQMKDKQDEEQRLKEEEEDKRQRTRRMMRTKMRMRRMRRTRRKMRRKMSPARPRTSCREACLQGWTEA

SEQ ID NO: 6337 - protein, 411 aa, synthetic construct
EPAVYFKEQFLDGDGWTSRWIESKHKSDFGKFVLSSGKFYGDEEKDKGLQTSQDARFYALSASFEPFSNKGQTLVVQFTVKHEQNIDCGGGYVKLFPNSLDQTDMHGDSEYNIMFGPDICGPGTKKVHVIFNYKGKNVLINKDIRCKDDEFTHLYTLIVRPDNTYEVKIDNSQVESGSLEDDWDFLPPKKIKDPDASKPEDWDERAKIDDPTDSKPEDWDKPEHIPDPDAKKPEDWDEEMDGEWEPPVIQNPEYKGEWKPRQIDNPDYKGTWIHPEIDNPEYSPDPSIYAYDNFGVLGLDLWQVKSGTIFDNFLITNDEAYAEEFGNETWGVTKAAEKQMKDKQDEEQRLKEEEEDKNAKRRRRQRTRRMMRTKMRMRRMRRTRRKMRRKMSPARPRTSCREACLQGWTEA

SEQ ID NO: 6338 - protein, 412 aa, synthetic construct
EPAVYFKEQFLDGDGWTSRWIESKHKSDFGKFVLSSGKFYGDEEKDKGLQTSQDARFYALSASFEPFSNKGQTLVVQFTVKHEQNIDCGGGYVKLFPNSLDQTDMHGDSEYNIMFGPDICGPGTKKVHVIFNYKGKNVLINKDIRCKDDEFTHLYTLIVRPDNTYEVKIDNSQVESGSLEDDWDFLPPKKIKDPDASKPEDWDERAKIDDPTDSKPEDWDKPEHIPDPDAKKPEDWDEEMDGEWEPPVIQNPEYKGEWKPRQIDNPDYKGTWIHPEIDNPEYSPDPSIYAYDNFGVLGLDLWQVKSGTIFDNFLITNDEAYAEEFGNETWGVTKAAEKQMKDKQDEEQRLKEEEEDKCFAKRRRRQRTRRMMRTKMRMRRMRRTRRKMRRKMSPARPRTSCREACLQGWTEA

SEQ ID NO: 6339 - protein, 404 aa, synthetic construct
EPAVYFKEQFLDGDGWTSRWIESKHKSDFGKFVLSSGKFYGDEEKDKGLQTSQDARFYALSASFEPFSNKGQTLVVQFTVKHEQNIDCGGGYVKLFPNSLDQTDMHGDSEYNIMFGPDICGPGTKKVHVIFNYKGKNVLINKDIRCKDDEFTHLYTLIVRPDNTYEVKIDNSQVESGSLEDDWDFLPPKKIKDPDASKPEDWDERAKIDDPTDSKPEDWDKPEHIPDPDAKKPEDWDEEMDGEWEPPVIQNPEYKGEWKPRQIDNPDYKGTWIHPEIDNPEYSPDPSIYAYDNFGVLGLDLWQVKSGTIFDNFLITNDEAYAEEFGNETWGVTKAAEKQMKDKQDEEQRLKEEEEDKKRKRRMMRTKMRMRRMRRTRRKMRRKMSPARPRTSCREACLQGWTEA

SEQ ID NO: 6340 - protein, 410 aa, synthetic construct
EPAVYFKEQFLDGDGWTSRWIESKHKSDFGKFVLSSGKFYGDEEKDKGLQTSQDARFYALSASFEPFSNKGQTLVVQFTVKHEQNIDCGGGYVKLFPNSLDQTDMHGDSEYNIMFGPDICGPGTKKVHVIFNYKGKNVLINKDIRCKDDEFTHLYTLIVRPDNTYEVKIDNSQVESGSLEDDWDFLPPKKIKDPDASKPEDWDERAKIDDPTDSKPEDWDKPEHIPDPDAKKPEDWDEEMDGEWEPPVIQNPEYKGEWKPRQIDNPDYKGTWIHPEIDNPEYSPDPSIYAYDNFGVLGLDLWQVKSGTIFDNFLITNDEAYAEEFGNETWGVTKAAEKQMKDKQDEEQRLKEEEEDKKRKEPPLCLRRMMRTKMRMRRMRRTRRKMRRKMSPARPRTSCREACLQGWTEA

SEQ ID NO: 6341 - protein, 409 aa, synthetic construct
EPAVYFKEQFLDGDGWTSRWIESKHKSDFGKFVLSSGKFYGDEEKDKGLQTSQDARFYALSASFEPFSNKGQTLVVQFTVKHEQNIDCGGGYVKLFPNSLDQTDMHGDSEYNIMFGPDICGPGTKKVHVIFNYKGKNVLINKDIRCKDDEFTHLYTLIVRPDNTYEVKIDNSQVESGSLEDDWDFLPPKKIKDPDASKPEDWDERAKIDDPTDSKPEDWDKPEHIPDPDAKKPEDWDEEMDGEWEPPVIQNPEYKGEWKPRQIDNPDYKGTWIHPEIDNPEYSPDPSIYAYDNFGVLGLDLWQVKSGTIFDNFLITNDEAYAEEFGNETWGVTKAAEKQMKDKQDEEQRLKEEEEDKKRKEDHPCRRMMRTKMRMRRMRRTRRKMRRKMSPARPRTSCREACLQGWTEA

SEQ ID NO: 6342 - protein, 413 aa, synthetic construct
EPAVYFKEQFLDGDGWTSRWIESKHKSDFGKFVLSSGKFYGDEEKDKGLQTSQDARFYALSASFEPFSNKGQTLVVQFTVKHEQNIDCGGGYVKLFPNSLDQTDMHGDSEYNIMFGPDICGPGTKKVHVIFNYKGKNVLINKDIRCKDDEFTHLYTLIVRPDNTYEVKIDNSQVESGSLEDDWDFLPPKKIKDPDASKPEDWDERAKIDDPTDSKPEDWDKPEHIPDPDAKKPEDWDEEMDGEWEPPVIQNPEYKGEWKPRQIDNPDYKGTWIHPEIDNPEYSPDPSIYAYDNFGVLGLDLWQVKSGTIFDNFLITNDEAYAEEFGNETWGVTKAAEKQMKDKQDEEQRLKEEEEDKKRKEEEEAEGNCRRMMRTKMRMRRMRRTRRKMRRKMSPARPRTSCREACLQGWTEA

SEQ ID NO: 6343 - protein, 412 aa, synthetic construct
EPAVYFKEQFLDGDGWTSRWIESKHKSDFGKFVLSSGKFYGDEEKDKGLQTSQDARFYALSASFEPFSNKGQTLVVQFTVKHEQNIDCGGGYVKLFPNSLDQTDMHGDSEYNIMFGPDICGPGTKKVHVIFNYKGKNVLINKDIRCKDDEFTHLYTLIVRPDNTYEVKIDNSQVESGSLEDDWDFLPPKKIKDPDASKPEDWDERAKIDDPTDSKPEDWDKPEHIPDPDAKKPEDWDEEMDGEWEPPVIQNPEYKGEWKPRQIDNPDYKGTWIHPEIDNPEYSPDPSIYAYDNFGVLGLDLWQVKSGTIFDNFLITNDEAYAEEFGNETWGVTKAAEKQMKDKQDEEQRLKEEEEDKKRKEEEEAEDCRRMMRTKMRMRRMRRTRRKMRRKMSPARPRTSCREACLQGWTEA

SEQ ID NO: 6344 - protein, 413 aa, synthetic construct
EPAVYFKEQFLDGDGWTSRWIESKHKSDFGKFVLSSGKFYGDEEKDKGLQTSQDARFYALSASFEPFSNKGQTLVVQFTVKHEQNIDCGGGYVKLFPNSLDQTDMHGDSEYNIMFGPDICGPGTKKVHVIFNYKGKNVLINKDIRCKDDEFTHLYTLIVRPDNTYEVKIDNSQVESGSLEDDWDFLPPKKIKDPDASKPEDWDERAKIDDPTDSKPEDWDKPEHIPDPDAKKPEDWDEEMDGEWEPPVIQNPEYKGEWKPRQIDNPDYKGTWIHPEIDNPEYSPDPSIYAYDNFGVLGLDLWQVKSGTIFDNFLITNDEAYAEEFGNETWGVTKAAEKQMKDKQDEEQRLKEEEEDKKRKEEEEAEDKCRRMMRTKMRMRRMRRTRRKMRRKMSPARPRTSCREACLQGWTEA

SEQ ID NO: 6345 - protein, 413 aa, synthetic construct
EPAVYFKEQFLDGDGWTSRWIESKHKSDFGKFVLSSGKFYGDEEKDKGLQTSQDARFYALSASFEPFSNKGQTLVVQFTVKHEQNIDCGGGYVKLFPNSLDQTDMHGDSEYNIMFGPDICGPGTKKVHVIFNYKGKNVLINKDIRCKDDEFTHLYTLIVRPDNTYEVKIDNSQVESGSLEDDWDFLPPKKIKDPDASKPEDWDERAKIDDPTDSKPEDWDKPEHIPDPDAKKPEDWDEEMDGEWEPPVIQNPEYKGEWKPRQIDNPDYKGTWIHPEIDNPEYSPDPSIYAYDNFGVLGLDLWQVKSGTIFDNFLITNDEAYAEEFGNETWGVTKAAEKQMKDKQDEEQRLKEEEEDKKRKEEEEAEDTCRRMMRTKMRMRRMRRTRRKMRRKMSPARPRTSCREACLQGWTEA

SEQ ID NO: 6346 - protein, 413 aa, synthetic construct
EPAVYFKEQFLDGDGWTSRWIESKHKSDFGKFVLSSGKFYGDEEKDKGLQTSQDARFYALSASFEPFSNKGQTLVVQFTVKHEQNIDCGGGYVKLFPNSLDQTDMHGDSEYNIMFGPDICGPGTKKVHVIFNYKGKNVLINKDIRCKDDEFTHLYTLIVRPDNTYEVKIDNSQVESGSLEDDWDFLPPKKIKDPDASKPEDWDERAKIDDPTDSKPEDWDKPEHIPDPDAKKPEDWDEEMDGEWEPPVIQNPEYKGEWKPRQIDNPDYKGTWIHPEIDNPEYSPDPSIYAYDNFGVLGLDLWQVKSGTIFDNFLITNDEAYAEEFGNETWGVTKAAEKQMKDKQDEEQRLKEEEEDKKRKEEEEAEDICRRMMRTKMRMRRMRRTRRKMRRKMSPARPRTSCREACLQGWTEA

SEQ ID NO: 6347 - protein, 123 aa, synthetic construct
EVKLVESGGGLVKPGGSLKLSCAASGFAFSRYDMSWVRQTPEKRLEWVATISSGGSYTYYPDSVKGRFTISRDNARNTLYLQMSSLRSEDTALYYCARHSAYYVNYENAMDYWGQGTSVTVSS

SEQ ID NO: 6348 - protein, 111 aa, synthetic construct
NIVLTQSPASLAVSLGQRATISCRASESVDSFGISFMHWYQQRPGQPPKLLIYLASNLESGVPARFSGSGSRTDFTLTIDPVEADDAATYYCQQNNEDPLTFGAGTKLELK

SEQ ID NO: 6349 - protein, 123 aa, synthetic construct
QVQLVESGGGLVKPGGSLRLSCAASGFAFSRYDMSWIRQAPGKGLEWVATISSGGSYTYYPDSVKGRFTISRDNAKNSLYLQMNSLRAEDTAVYYCARHSAYYVNYENAMDYWGQGTLVTVSS

SEQ ID NO: 6350 - protein, 123 aa, synthetic construct
QVQLVESGGGVVQPGRSLRLSCAASGFAFSRYDMSWVRQAPGKGLEWVATISSGGSYTYYPDSVKGRFTISRDNSKNTLYLQMNSLRAEDTAVYYCARHSAYYVNYENAMDYWGQGTLVTVSS

SEQ ID NO: 6351 - protein, 123 aa, synthetic construct
EVQLVESGGGLVQPGGSLRLSCAASGFAFSRYDMSWVRQAPGKGLEWVATISSGGSYTYYPDSVKGRFTISRDNSKNTLYLQMNSLRAEDTAVYYCARHSAYYVNYENAMDYWGQGTLVTVSS

SEQ ID NO: 6352 - protein, 111 aa, synthetic construct
DIVLTQTPLSLSVTPGQPASISCRASESVDSFGISFMHWYLQKPGQSPQLLIYLASNLESGVPDRFSGSGSRTDFTLKISRVEAEDVGVYYCQQNNEDPLTFGQGTKLEIK

SEQ ID NO: 6353 - protein, 111 aa, synthetic construct
DIVLTQSPLSLPVTLGQPASISCRASESVDSFGISFMHWYQQRPGQSPRLLIYLASNLESGVPDRFSGSGSRTDFTLKISRVEAEDVGVYYCQQNNEDPLTFGQGTKLEIK

SEQ ID NO: 6354 - protein, 111 aa, synthetic construct
DIVLTQTPLSLPVTPGEPASISCRASESVDSFGISFMHWYLQKPGQSPQLLIYLASNLESGVPDRFSGSGSRTDFTLKISRVEAEDVGVYYCQQNNEDPLTFGQGTKLEIK

SEQ ID NO: 6355 - protein, 111 aa, synthetic construct
EIVLTQSPATLSLSPGERATLSCRASESVDSFGISFMHWYQQKPGQAPRLLIYLASNLESGIPARFSGSGSRTDFTLTISSLEPEDFAVYYCQQNNEDPLTFGQGTKLEIK

SEQ ID NO: 6356 - protein, 111 aa, synthetic construct
DIQLTQSPSSLSASVGDRVTITCRASESVDSFGISFMHWYQQKPGKAPKLLIYLASNLESGVPSRFSGSGSRTDFTFTISSLQPEDIATYYCQQNNEDPLTFGQGTKLEIK

SEQ ID NO: 6357 - protein, 28 aa, synthetic construct
EVKLVESGGGLVKPGGSLKLSCAASGFA

SEQ ID NO: 6358 - protein, 7 aa, synthetic construct
FSRYDMS

SEQ ID NO: 6359 - protein, 14 aa, synthetic construct
WVRQTPEKRLEWVA

SEQ ID NO: 6360 - protein, 17 aa, synthetic construct
TISSGGSYTYYPDSVKG

SEQ ID NO: 6361 - protein, 32 aa, synthetic construct
RFTISRDNARNTLYLQMSSLRSEDTALYYCAR

SEQ ID NO: 6362 - protein, 28 aa, synthetic construct
QVQLVESGGGLVKPGGSLRLSCAASGFA

SEQ ID NO: 6363 - protein, 14 aa, synthetic construct
WIRQAPGKGLEWVA

SEQ ID NO: 6364 - protein, 133 aa, unidentified
  source 1..133: note = IL-2 cytokine sequence
APTSSSTKKTQLQLEHLLLDLQMILNGINNYKNPKLTRMLTFKFYMPKKATELKHLQCLEEELKPLEEVLNLAQSKNFHLRPRDLISNINVIVLELKGSETTFMCEYADETATIVEFLNRWITFAQSIISTLT

SEQ ID NO: 6365 - protein, 133 aa, unidentified
  source 1..133: note = IL-2 cytokine sequence
APASSSTKKTQLQLEHLLLDLQMILNGINNYKNPKLTRMLTAKFAMPKKATELKHLQCLEEELKPLEEVLNGAQSKNFHLRPRDLISNINVIVLELKGSETTFMCEYADETATIVEFLNRWITFAQSIISTLT

SEQ ID NO: 6366 - protein, 518 aa, unidentified
  source 1..518: note = IL-12 cytokine sequence
IWELKKDVYVVELDWYPDAPGEMVVLTCDTPEEDGITWTLDQSSEVLGSGKTLTIQVKEFGDAGQYTCHKGGEVLSHSLLLLHKKEDGIWSTDILKDQKEPKNKTFLRCEAKNYSGRFTCWWLTTISTDLTFSVKSSRGSSDPQGVTCGAATLSAERVRGDNKEYEYSVECQEDSACPAAEESLPIEVMVDAVHKLKYENYTSSFFIRDIIKPDPPKNLQLKPLKNSRQVEVSWEYPDTWSTPHSYFSLTFCVQVQGKSKREKKDRVFTDKTSATVICRKNASISVRAQDRYYSSSWSEWASVPCSGGGGSGGGGSGGGGSRNLPVATPDPGMFPCLHHSQNLLRAVSNMLQKARQTLEFYPCTSEEIDHEDITKDKTSTVEACLPLELTKNESCLNSRETSFITNGSCLASRKTSFMMALCLSSIYEDLKMYQVEFKTMNAKLLMDPKRQIFLDQNMLAVIDELMQALNFNSETVPQKSSLEEPDFYKTKIKLCILLHAFRIRAVTIDRVMSYLNAS

SEQ ID NO: 6367 - protein, 340 aa, unidentified
  source 1..340: note = IL-10 cytokine sequence
SPGQGTQSENSCTHFPGNLPNMLRDLRDAFSRVKTFFQMKDQLDNLLLKESLLEDFKGYLGCQALSEMIQFYLEEVMPQAENQDPDIKAHVNSLGENLKTLRLRLRRCHRFLPCENKSKAVEQVKNAFNKLQEKGIYKAMSEFDIFINYIEAYMTMKIRNGGGGSGGGGSGGGGSGGGGSSPGQGTQSENSCTHFPGNLPNMLRDLRDAFSRVKTFFQMKDQLDNLLLKESLLEDFKGYLGCQALSEMIQFYLEEVMPQAENQDPDIKAHVNSLGENLKTLRLRLRRCHRFLPCENKSKAVEQVKNAFNKLQEKGIYKAMSEFDIFINYIEAYMTMKIRN

SEQ ID NO: 6368 - protein, 166 aa, unidentified
  source 1..166: note = IL-10 cytokine sequence
SPGQGTQSENSCTHFPGNLPNMLRDLRDAFSRVKTFFQMKDQLDNLLLKESLLEDFKGYLGCQALSEMIQFYLEEVMPQAENQDPDIKAHVNSLGENLKTLRLRLRRCHRFLPCENGGGSGGKSKAVEQVKNAFNKLQEKGIYKAMSEFDIFINYIEAYMTMKIRN

SEQ ID NO: 6369 - protein, 14 aa, synthetic construct
WVRQAPGKGLEWVA

SEQ ID NO: 6370 - protein, 114 aa, unidentified
  source 1..114: note = IL-15 cytokine sequence
NWVNVISDLKKIEDLIQSMHIDATLYTESDVHPSCKVTAMKCFLLELQVISLASGDASIHDTVENLIILANNSLSSNGAVTESGCKECEELEEKNIKEFLQSFVHIVQMFINTS

SEQ ID NO: 6371 - protein, 32 aa, synthetic construct
RFTISRDNSKNTLYLQMNSLRAEDTAVYYCAR

SEQ ID NO: 6372 - protein, 113 aa, synthetic construct
QVQLVQSGAEVKKPGASVKVSCKASGYSFTGYYIHWVRQAPGQGLEWIGYISAYNGASSYNQKFKGRATFTVDTSTSTAYMELRSLRSDDMAVYYCASSMDYWGQGTLVTVSS

SEQ ID NO: 6373 - protein, 28 aa, synthetic construct
EVQLVESGGGLVQPGGSLRLSCAASGFA

SEQ ID NO: 6374 - protein, 23 aa, synthetic construct
NIVLTQSPASLAVSLGQRATISC

SEQ ID NO: 6375 - protein, 15 aa, synthetic construct
WYQQRPGQPPKLLIY

SEQ ID NO: 6376-6377 - skipped (2 entries)

SEQ ID NO: 6378 - protein, 390 aa, Homo sapiens
MPPSGLRLLLLLLPLLWLLVLTPGRPAAGLSTCKTIDMELVKRKRIEAIRGQILSKLRLASPPSQGEVPPGPLPEAVLALYNSTRDRVAGESAEPEPEPEADYYAKEVTRVLMVETHNEIYDKFKQSTHSIYMFFNTSELREAVPEPVLLSRAELRLLRLKLKVEQHVELYQKYSNNSWRYLSNRLLAPSDSPEWLSFDVTGVVRQWLSRGGEIEGFRLSAHCSCDSRDNTLQVDINGFTTGRRGDLATIHGMNRPFLLLMATPLERAQHLQSSRHRRALDTNYCFSSTEKNCCVRQLYIDFRKDLGWKWIHEPKGYHANFCLGPCPYIWSLDTQYSKVLALYNQHNPGASAAPCCVPQALEPLPIVYYVGRKPKVEQLSNMIVRSCKCS

SEQ ID NO: 6379 - protein, 414 aa, Homo sapiens
MHYCVLSAFLILHLVTVALSLSTCSTLDMDQFMRKRIEAIRGQILSKLKLTSPPEDYPEPEEVPPEVISIYNSTRDLLQEKASRRAAACERERSDEEYYAKEVYKIDMPPFFPSENAIPPTFYRPYFRIVRFDVSAMEKNASNLVKAEFRVFRLQNPKARVPEQRIELYQILKSKDLTSPTQRYIDSKVVKTRAEGEWLSFDVTDAVHEWLHHKDRNLGFKISLHCPCCTFVPSNNYIIPNKSEELEARFAGIDGTSTYTSGDQKTIKSTRKKNSGKTPHLLLMLLPSYRLESQQTNRRKKRALDAAYCFRNVQDNCCLRPLYIDFKRDLGWKWIHEPKGYNANFCAGACPYLWSSDTQHSRVLSLYNTINPEASASPCCVSQDLEPLTILYYIGKTPKIEQLSNMIVKSCKCS

SEQ ID NO: 6380 - protein, 412 aa, Homo sapiens
MKMHLQRALVVLALLNFATVSLSLSTCTTLDFGHIKKKRVEAIRGQILSKLRLTSPPEPTVMTHVPYQVLALYNSTRELLEEMHGEREEGCTQENTESEYYAKEIHKFDMIQGLAEHNELAVCPKGITSKVFRFNVSSVEKNRTNLFRAEFRVLRVPNPSSKRNEQRIELFQILRPDEHIAKQRYIGGKNLPTRGTAEWLSFDVTDTVREWLLRRESNLGLEISIHCPCHTFQPNGDILENIHEVMEIKFKGVDNEDDHGRGDLGRLKKQKDHHNPHLILMMIPPHRLDNPGQGGQRKKRALDTNYCFRNLEENCCVRPLYIDFRQDLGWKWVHEPKGYYANFCSGPCPYLRSADTTHSTVLGLYNTLNPEASASPCCVPQDLEPLTILYYVGRTPKVEQLSNMVVKSCKCS

SEQ ID NO: 6381 - protein, 503 aa, Homo sapiens
MEAAVAAPRPRLLLLVLAAAAAAAAALLPGATALQCFCHLCTKDNFTCVTDGLCFVSVTETTDKVIHNSMCIAEIDLIPRDRPFVCAPSSKTGSVTTTYCCNQDHCNKIELPTTVKSSPGLGPVELAAVIAGPVCFVCISLMLMVYICHNRTVIHHRVPNEEDPSLDRPFISEGTTLKDLIYDMTTSGSGSGLPLLVQRTIARTIVLQESIGKGRFGEVWRGKWRGEEVAVKIFSSREERSWFREAEIYQTVMLRHENILGFIAADNKDNGTWTQLWLVSDYHEHGSLFDYLNRYTVTVEGMIKLALSTASGLAHLHMEIVGTQGKPAIAHRDLKSKNILVKKNGTCCIADLGLAVRHDSATDTIDIAPNHRVGTKRYMAPEVLDDSINMKHFESFKRADIYAMGLVFWEIARRCSIGGIHEDYQLPYYDLVPSDPSVEEMRKVVCEQKLRPNIPNRWQSCEALRVMAKIMRECWYANGAARLTALRIKKTLSQLSQQEGIKM

SEQ ID NO: 6382 - protein, 507 aa, Homo sapiens
MEAAVAAPRPRLLLLVLAAAAAAAAALLPGATALQCFCHLCTKDNFTCVTDGLCFVSVTETTDKVIHNSMCIAEIDLIPRDRPFVCAPSSKTGSVTTTYCCNQDHCNKIELPTTGPFSVKSSPGLGPVELAAVIAGPVCFVCISLMLMVYICHNRTVIHHRVPNEEDPSLDRPFISEGTTLKDLIYDMTTSGSGSGLPLLVQRTIARTIVLQESIGKGRFGEVWRGKWRGEEVAVKIFSSREERSWFREAEIYQTVMLRHENILGFIAADNKDNGTWTQLWLVSDYHEHGSLFDYLNRYTVTVEGMIKLALSTASGLAHLHMEIVGTQGKPAIAHRDLKSKNILVKKNGTCCIADLGLAVRHDSATDTIDIAPNHRVGTKRYMAPEVLDDSINMKHFESFKRADIYAMGLVFWEIARRCSIGGIHEDYQLPYYDLVPSDPSVEEMRKVVCEQKLRPNIPNRWQSCEALRVMAKIMRECWYANGAARLTALRIKKTLSQLSQQEGIKM

SEQ ID NO: 6383 - protein, 426 aa, Homo sapiens
MEAAVAAPRPRLLLLVLAAAAAAAAALLPGATALQCFCHLCTKDNFTCVTDGLCFVSVTETTDKVIHNSMCIAEIDLIPRDRPFVCAPSSKTGSVTTTYCCNQDHCNKIELPTTGLPLLVQRTIARTIVLQESIGKGRFGEVWRGKWRGEEVAVKIFSSREERSWFREAEIYQTVMLRHENILGFIAADNKDNGTWTQLWLVSDYHEHGSLFDYLNRYTVTVEGMIKLALSTASGLAHLHMEIVGTQGKPAIAHRDLKSKNILVKKNGTCCIADLGLAVRHDSATDTIDIAPNHRVGTKRYMAPEVLDDSINMKHFESFKRADIYAMGLVFWEIARRCSIGGIHEDYQLPYYDLVPSDPSVEEMRKVVCEQKLRPNIPNRWQSCEALRVMAKIMRECWYANGAARLTALRIKKTLSQLSQQEGIKM

SEQ ID NO: 6384 - protein, 567 aa, Homo sapiens
MGRGLLRGLWPLHIVLWTRIASTIPPHVQKSVNNDMIVTDNNGAVKFPQLCKFCDVRFSTCDNQKSCMSNCSITSICEKPQEVCVAVWRKNDENITLETVCHDPKLPYHDFILEDAASPKCIMKEKKKPGETFFMCSCSSDECNDNIIFSEEYNTSNPDLLLVIFQVTGISLLPPLGVAISVIIIFYCYRVNRQQKLSSTWETGKTRKLMEFSEHCAIILEDDRSDISSTCANNINHNTELLPIELDTLVGKGRFAEVYKAKLKQNTSEQFETVAVKIFPYEEYASWKTEKDIFSDINLKHENILQFLTAEERKTELGKQYWLITAFHAKGNLQEYLTRHVISWEDLRKLGSSLARGIAHLHSDHTPCGRPKMPIVHRDLKSSNILVKNDLTCCLCDFGLSLRLDPTLSVDDLANSGQVGTARYMAPEVLESRMNLENVESFKQTDVYSMALVLWEMTSRCNAVGEVKDYEPPFGSKVREHPCVESMKDNVLRDRGRPEIPSFWLNHQGIQMVCETLTECWDHDPEARLTAQCVAERFSELEHLDRLSGRSCSEEKIPEDGSLNTTK

SEQ ID NO: 6385 - protein, 592 aa, Homo sapiens
MGRGLLRGLWPLHIVLWTRIASTIPPHVQKSDVEMEAQKDEIICPSCNRTAHPLRHINNDMIVTDNNGAVKFPQLCKFCDVRFSTCDNQKSCMSNCSITSICEKPQEVCVAVWRKNDENITLETVCHDPKLPYHDFILEDAASPKCIMKEKKKPGETFFMCSCSSDECNDNIIFSEEYNTSNPDLLLVIFQVTGISLLPPLGVAISVIIIFYCYRVNRQQKLSSTWETGKTRKLMEFSEHCAIILEDDRSDISSTCANNINHNTELLPIELDTLVGKGRFAEVYKAKLKQNTSEQFETVAVKIFPYEEYASWKTEKDIFSDINLKHENILQFLTAEERKTELGKQYWLITAFHAKGNLQEYLTRHVISWEDLRKLGSSLARGIAHLHSDHTPCGRPKMPIVHRDLKSSNILVKNDLTCCLCDFGLSLRLDPTLSVDDLANSGQVGTARYMAPEVLESRMNLENVESFKQTDVYSMALVLWEMTSRCNAVGEVKDYEPPFGSKVREHPCVESMKDNVLRDRGRPEIPSFWLNHQGIQMVCETLTECWDHDPEARLTAQCVAERFSELEHLDRLSGRSCSEEKIPEDGSLNTTK

SEQ ID NO: 6386 - protein, 137 aa, Homo sapiens
TIPPHVQKSVNNDMIVTDNNGAVKFPQLCKFCDVRFSTCDNQKSCMSNCSITSICEKPQEVCVAVWRKNDENITLETVCHDPKLPYHDFILEDAASPKCIMKEKKKPGETFFMCSCSSDECNDNIIFSEEYNTSNPD

SEQ ID NO: 6387 - protein, 136 aa, Homo sapiens
IPPHVQKSVNNDMIVTDNNGAVKFPQLCKFCDVRFSTCDNQKSCMSNCSITSICEKPQEVCVAVWRKNDENITLETVCHDPKLPYHDFILEDAASPKCIMKEKKKPGETFFMCSCSSDECNDNIIFSEEYNTSNPD

SEQ ID NO: 6388 - protein, 162 aa, Homo sapiens
TIPPHVQKSDVEMEAQKDEIICPSCNRTAHPLRHINNDMIVTDNNGAVKFPQLCKFCDVRFSTCDNQKSCMSNCSITSICEKPQEVCVAVWRKNDENITLETVCHDPKLPYHDFILEDAASPKCIMKEKKKPGETFFMCSCSSDECNDNIIFSEEYNTSNPD

SEQ ID NO: 6389 - protein, 101 aa, Homo sapiens
QLCKFCDVRFSTCDNQKSCMSNCSITSICEKPQEVCVAVWRKNDENITLETVCHDPKLPYHDFILEDAASPKCIMKEKKKPGETFFMCSCSSDECNDNIIF

SEQ ID NO: 6390 - protein, 93 aa, Homo sapiens
LQCFCHLCTKDNFTCVTDGLCFVSVTETTDKVIHNSMCIAEIDLIPRDRPFVCAPSSKTGSVTTTYCCNQDHCNKIELPTTVKSSPGLGPVEL

SEQ ID NO: 6391 - protein, 79 aa, Homo sapiens
ALQCFCHLCTKDNFTCVTDGLCFVSVTETTDKVIHNSMCIAEIDLIPRDRPFVCAPSSKTGSVTTTYCCNQDHCNKIEL

SEQ ID NO: 6392 - protein, 851 aa, Homo sapiens
MTSHYVIAIFALMSSCLATAGPEPGALCELSPVSASHPVQALMESFTVLSGCASRGTTGLPQEVHVLNLRTAGQGPGQLQREVTLHLNPISSVHIHHKSVVFLLNSPHPLVWHLKTERLATGVSRLFLVSEGSVVQFSSANFSLTAETEERNFPHGNEHLLNWARKEYGAVTSFTELKIARNIYIKVGEDQVFPPKCNIGKNFLSLNYLAEYLQPKAAEGCVMSSQPQNEEVHIIELITPNSNPYSAFQVDITIDIRPSQEDLEVVKNLILILKCKKSVNWVIKSFDVKGSLKIIAPNSIGFGKESERSMTMTKSIRDDIPSTQGNLVKWALDNGYSPITSYTMAPVANRFHLRLENNAEEMGDEEVHTIPPELRILLDPGALPALQNPPIRGGEGQNGGLPFPFPDISRRVWNEEGEDGLPRPKDPVIPSIQLFPGLREPEEVQGSVDIALSVKCDNEKMIVAVEKDSFQASGYSGMDVTLLDPTCKAKMNGTHFVLESPLNGCGTRPRWSALDGVVYYNSIVIQVPALGDSSGWPDGYEDLESGDNGFPGDMDEGDASLFTRPEIVVFNCSLQQVRNPSSFQEQPHGNITFNMELYNTDLFLVPSQGVFSVPENGHVYVEVSVTKAEQELGFAIQTCFISPYSNPDRMSHYTIIENICPKDESVKFYSPKRVHFPIPQADMDKKRFSFVFKPVFNTSLLFLQCELTLCTKMEKHPQKLPKCVPPDEACTSLDASIIWAMMQNKKTFTKPLAVIHHEAESKEKGPSMKEPNPISPPIFHGLDTLTVMGIAFAAFVIGALLTGALWYIYSHTGETAGRQQVPTSPPASENSSAAHSIGSTQSTPCSSSSTA

SEQ ID NO: 6393 - protein, 850 aa, Homo sapiens
MTSHYVIAIFALMSSCLATAGPEPGALCELSPVSASHPVQALMESFTVLSGCASRGTTGLPQEVHVLNLRTAGQGPGQLQREVTLHLNPISSVHIHHKSVVFLLNSPHPLVWHLKTERLATGVSRLFLVSEGSVVQFSSANFSLTAETEERNFPHGNEHLLNWARKEYGAVTSFTELKIARNIYIKVGEDQVFPPKCNIGKNFLSLNYLAEYLQPKAAEGCVMSSQPQNEEVHIIELITPNSNPYSAFQVDITIDIRPSQEDLEVVKNLILILKCKKSVNWVIKSFDVKGSLKIIAPNSIGFGKESERSMTMTKSIRDDIPSTQGNLVKWALDNGYSPITSYTMAPVANRFHLRLENNEEMGDEEVHTIPPELRILLDPGALPALQNPPIRGGEGQNGGLPFPFPDISRRVWNEEGEDGLPRPKDPVIPSIQLFPGLREPEEVQGSVDIALSVKCDNEKMIVAVEKDSFQASGYSGMDVTLLDPTCKAKMNGTHFVLESPLNGCGTRPRWSALDGVVYYNSIVIQVPALGDSSGWPDGYEDLESGDNGFPGDMDEGDASLFTRPEIVVFNCSLQQVRNPSSFQEQPHGNITFNMELYNTDLFLVPSQGVFSVPENGHVYVEVSVTKAEQELGFAIQTCFISPYSNPDRMSHYTIIENICPKDESVKFYSPKRVHFPIPQADMDKKRFSFVFKPVFNTSLLFLQCELTLCTKMEKHPQKLPKCVPPDEACTSLDASIIWAMMQNKKTFTKPLAVIHHEAESKEKGPSMKEPNPISPPIFHGLDTLTVMGIAFAAFVIGALLTGALWYIYSHTGETAGRQQVPTSPPASENSSAAHSIGSTQSTPCSSSSTA

SEQ ID NO: 6394 - protein, 767 aa, Homo sapiens
GPEPGALCELSPVSASHPVQALMESFTVLSGCASRGTTGLPQEVHVLNLRTAGQGPGQLQREVTLHLNPISSVHIHHKSVVFLLNSPHPLVWHLKTERLATGVSRLFLVSEGSVVQFSSANFSLTAETEERNFPHGNEHLLNWARKEYGAVTSFTELKIARNIYIKVGEDQVFPPKCNIGKNFLSLNYLAEYLQPKAAEGCVMSSQPQNEEVHIIELITPNSNPYSAFQVDITIDIRPSQEDLEVVKNLILILKCKKSVNWVIKSFDVKGSLKIIAPNSIGFGKESERSMTMTKSIRDDIPSTQGNLVKWALDNGYSPITSYTMAPVANRFHLRLENNAEEMGDEEVHTIPPELRILLDPGALPALQNPPIRGGEGQNGGLPFPFPDISRRVWNEEGEDGLPRPKDPVIPSIQLFPGLREPEEVQGSVDIALSVKCDNEKMIVAVEKDSFQASGYSGMDVTLLDPTCKAKMNGTHFVLESPLNGCGTRPRWSALDGVVYYNSIVIQVPALGDSSGWPDGYEDLESGDNGFPGDMDEGDASLFTRPEIVVFNCSLQQVRNPSSFQEQPHGNITFNMELYNTDLFLVPSQGVFSVPENGHVYVEVSVTKAEQELGFAIQTCFISPYSNPDRMSHYTIIENICPKDESVKFYSPKRVHFPIPQADMDKKRFSFVFKPVFNTSLLFLQCELTLCTKMEKHPQKLPKCVPPDEACTSLDASIIWAMMQNKKTFTKPLAVIHHEAESKEKGPSMKEPNPISPPIFHGLDTLTV

SEQ ID NO: 6395 - protein, 361 aa, Homo sapiens
LSTCKTIDMELVKRKRIEAIRGQILSKLRLASPPSQGEVPPGPLPEAVLALYNSTRDRVAGESAEPEPEPEADYYAKEVTRVLMVETHNEIYDKFKQSTHSIYMFFNTSELREAVPEPVLLSRAELRLLRLKLKVEQHVELYQKYSNNSWRYLSNRLLAPSDSPEWLSFDVTGVVRQWLSRGGEIEGFRLSAHCSCDSRDNTLQVDINGFTTGRRGDLATIHGMNRPFLLLMATPLERAQHLQSSRHRRALDTNYCFSSTEKNCCVRQLYIDFRKDLGWKWIHEPKGYHANFCLGPCPYIWSLDTQYSKVLALYNQHNPGASAAPCCVPQALEPLPIVYYVGRKPKVEQLSNMIVRSCKCS

SEQ ID NO: 6396 - protein, 394 aa, Homo sapiens
LSTCSTLDMDQFMRKRIEAIRGQILSKLKLTSPPEDYPEPEEVPPEVISIYNSTRDLLQEKASRRAAACERERSDEEYYAKEVYKIDMPPFFPSENAIPPTFYRPYFRIVRFDVSAMEKNASNLVKAEFRVFRLQNPKARVPEQRIELYQILKSKDLTSPTQRYIDSKVVKTRAEGEWLSFDVTDAVHEWLHHKDRNLGFKISLHCPCCTFVPSNNYIIPNKSEELEARFAGIDGTSTYTSGDQKTIKSTRKKNSGKTPHLLLMLLPSYRLESQQTNRRKKRALDAAYCFRNVQDNCCLRPLYIDFKRDLGWKWIHEPKGYNANFCAGACPYLWSSDTQHSRVLSLYNTINPEASASPCCVSQDLEPLTILYYIGKTPKIEQLSNMIVKSCKCS

SEQ ID NO: 6397 - protein, 389 aa, Homo sapiens
LSTCTTLDFGHIKKKRVEAIRGQILSKLRLTSPPEPTVMTHVPYQVLALYNSTRELLEEMHGEREEGCTQENTESEYYAKEIHKFDMIQGLAEHNELAVCPKGITSKVFRFNVSSVEKNRTNLFRAEFRVLRVPNPSSKRNEQRIELFQILRPDEHIAKQRYIGGKNLPTRGTAEWLSFDVTDTVREWLLRRESNLGLEISIHCPCHTFQPNGDILENIHEVMEIKFKGVDNEDDHGRGDLGRLKKQKDHHNPHLILMMIPPHRLDNPGQGGQRKKRALDTNYCFRNLEENCCVRPLYIDFRQDLGWKWVHEPKGYYANFCSGPCPYLRSADTTHSTVLGLYNTLNPEASASPCCVPQDLEPLTILYYVGRTPKVEQLSNMVVKSCKCS

SEQ ID NO: 6398 - protein, 470 aa, Homo sapiens
LQCFCHLCTKDNFTCVTDGLCFVSVTETTDKVIHNSMCIAEIDLIPRDRPFVCAPSSKTGSVTTTYCCNQDHCNKIELPTTVKSSPGLGPVELAAVIAGPVCFVCISLMLMVYICHNRTVIHHRVPNEEDPSLDRPFISEGTTLKDLIYDMTTSGSGSGLPLLVQRTIARTIVLQESIGKGRFGEVWRGKWRGEEVAVKIFSSREERSWFREAEIYQTVMLRHENILGFIAADNKDNGTWTQLWLVSDYHEHGSLFDYLNRYTVTVEGMIKLALSTASGLAHLHMEIVGTQGKPAIAHRDLKSKNILVKKNGTCCIADLGLAVRHDSATDTIDIAPNHRVGTKRYMAPEVLDDSINMKHFESFKRADIYAMGLVFWEIARRCSIGGIHEDYQLPYYDLVPSDPSVEEMRKVVCEQKLRPNIPNRWQSCEALRVMAKIMRECWYANGAARLTALRIKKTLSQLSQQEGIKM

SEQ ID NO: 6399 - protein, 474 aa, Homo sapiens
LQCFCHLCTKDNFTCVTDGLCFVSVTETTDKVIHNSMCIAEIDLIPRDRPFVCAPSSKTGSVTTTYCCNQDHCNKIELPTTGPFSVKSSPGLGPVELAAVIAGPVCFVCISLMLMVYICHNRTVIHHRVPNEEDPSLDRPFISEGTTLKDLIYDMTTSGSGSGLPLLVQRTIARTIVLQESIGKGRFGEVWRGKWRGEEVAVKIFSSREERSWFREAEIYQTVMLRHENILGFIAADNKDNGTWTQLWLVSDYHEHGSLFDYLNRYTVTVEGMIKLALSTASGLAHLHMEIVGTQGKPAIAHRDLKSKNILVKKNGTCCIADLGLAVRHDSATDTIDIAPNHRVGTKRYMAPEVLDDSINMKHFESFKRADIYAMGLVFWEIARRCSIGGIHEDYQLPYYDLVPSDPSVEEMRKVVCEQKLRPNIPNRWQSCEALRVMAKIMRECWYANGAARLTALRIKKTLSQLSQQEGIKM

SEQ ID NO: 6400 - protein, 393 aa, Homo sapiens
LQCFCHLCTKDNFTCVTDGLCFVSVTETTDKVIHNSMCIAEIDLIPRDRPFVCAPSSKTGSVTTTYCCNQDHCNKIELPTTGLPLLVQRTIARTIVLQESIGKGRFGEVWRGKWRGEEVAVKIFSSREERSWFREAEIYQTVMLRHENILGFIAADNKDNGTWTQLWLVSDYHEHGSLFDYLNRYTVTVEGMIKLALSTASGLAHLHMEIVGTQGKPAIAHRDLKSKNILVKKNGTCCIADLGLAVRHDSATDTIDIAPNHRVGTKRYMAPEVLDDSINMKHFESFKRADIYAMGLVFWEIARRCSIGGIHEDYQLPYYDLVPSDPSVEEMRKVVCEQKLRPNIPNRWQSCEALRVMAKIMRECWYANGAARLTALRIKKTLSQLSQQEGIKM

SEQ ID NO: 6401 - protein, 545 aa, Homo sapiens
TIPPHVQKSVNNDMIVTDNNGAVKFPQLCKFCDVRFSTCDNQKSCMSNCSITSICEKPQEVCVAVWRKNDENITLETVCHDPKLPYHDFILEDAASPKCIMKEKKKPGETFFMCSCSSDECNDNIIFSEEYNTSNPDLLLVIFQVTGISLLPPLGVAISVIIIFYCYRVNRQQKLSSTWETGKTRKLMEFSEHCAIILEDDRSDISSTCANNINHNTELLPIELDTLVGKGRFAEVYKAKLKQNTSEQFETVAVKIFPYEEYASWKTEKDIFSDINLKHENILQFLTAEERKTELGKQYWLITAFHAKGNLQEYLTRHVISWEDLRKLGSSLARGIAHLHSDHTPCGRPKMPIVHRDLKSSNILVKNDLTCCLCDFGLSLRLDPTLSVDDLANSGQVGTARYMAPEVLESRMNLENVESFKQTDVYSMALVLWEMTSRCNAVGEVKDYEPPFGSKVREHPCVESMKDNVLRDRGRPEIPSFWLNHQGIQMVCETLTECWDHDPEARLTAQCVAERFSELEHLDRLSGRSCSEEKIPEDGSLNTTK

SEQ ID NO: 6402 - protein, 570 aa, Homo sapiens
TIPPHVQKSDVEMEAQKDEIICPSCNRTAHPLRHINNDMIVTDNNGAVKFPQLCKFCDVRFSTCDNQKSCMSNCSITSICEKPQEVCVAVWRKNDENITLETVCHDPKLPYHDFILEDAASPKCIMKEKKKPGETFFMCSCSSDECNDNIIFSEEYNTSNPDLLLVIFQVTGISLLPPLGVAISVIIIFYCYRVNRQQKLSSTWETGKTRKLMEFSEHCAIILEDDRSDISSTCANNINHNTELLPIELDTLVGKGRFAEVYKAKLKQNTSEQFETVAVKIFPYEEYASWKTEKDIFSDINLKHENILQFLTAEERKTELGKQYWLITAFHAKGNLQEYLTRHVISWEDLRKLGSSLARGIAHLHSDHTPCGRPKMPIVHRDLKSSNILVKNDLTCCLCDFGLSLRLDPTLSVDDLANSGQVGTARYMAPEVLESRMNLENVESFKQTDVYSMALVLWEMTSRCNAVGEVKDYEPPFGSKVREHPCVESMKDNVLRDRGRPEIPSFWLNHQGIQMVCETLTECWDHDPEARLTAQCVAERFSELEHLDRLSGRSCSEEKIPEDGSLNTTK

SEQ ID NO: 6403 - protein, 831 aa, Homo sapiens
GPEPGALCELSPVSASHPVQALMESFTVLSGCASRGTTGLPQEVHVLNLRTAGQGPGQLQREVTLHLNPISSVHIHHKSVVFLLNSPHPLVWHLKTERLATGVSRLFLVSEGSVVQFSSANFSLTAETEERNFPHGNEHLLNWARKEYGAVTSFTELKIARNIYIKVGEDQVFPPKCNIGKNFLSLNYLAEYLQPKAAEGCVMSSQPQNEEVHIIELITPNSNPYSAFQVDITIDIRPSQEDLEVVKNLILILKCKKSVNWVIKSFDVKGSLKIIAPNSIGFGKESERSMTMTKSIRDDIPSTQGNLVKWALDNGYSPITSYTMAPVANRFHLRLENNAEEMGDEEVHTIPPELRILLDPGALPALQNPPIRGGEGQNGGLPFPFPDISRRVWNEEGEDGLPRPKDPVIPSIQLFPGLREPEEVQGSVDIALSVKCDNEKMIVAVEKDSFQASGYSGMDVTLLDPTCKAKMNGTHFVLESPLNGCGTRPRWSALDGVVYYNSIVIQVPALGDSSGWPDGYEDLESGDNGFPGDMDEGDASLFTRPEIVVFNCSLQQVRNPSSFQEQPHGNITFNMELYNTDLFLVPSQGVFSVPENGHVYVEVSVTKAEQELGFAIQTCFISPYSNPDRMSHYTIIENICPKDESVKFYSPKRVHFPIPQADMDKKRFSFVFKPVFNTSLLFLQCELTLCTKMEKHPQKLPKCVPPDEACTSLDASIIWAMMQNKKTFTKPLAVIHHEAESKEKGPSMKEPNPISPPIFHGLDTLTVMGIAFAAFVIGALLTGALWYIYSHTGETAGRQQVPTSPPASENSSAAHSIGSTQSTPCSSSSTA

SEQ ID NO: 6404 - protein, 830 aa, Homo sapiens
GPEPGALCELSPVSASHPVQALMESFTVLSGCASRGTTGLPQEVHVLNLRTAGQGPGQLQREVTLHLNPISSVHIHHKSVVFLLNSPHPLVWHLKTERLATGVSRLFLVSEGSVVQFSSANFSLTAETEERNFPHGNEHLLNWARKEYGAVTSFTELKIARNIYIKVGEDQVFPPKCNIGKNFLSLNYLAEYLQPKAAEGCVMSSQPQNEEVHIIELITPNSNPYSAFQVDITIDIRPSQEDLEVVKNLILILKCKKSVNWVIKSFDVKGSLKIIAPNSIGFGKESERSMTMTKSIRDDIPSTQGNLVKWALDNGYSPITSYTMAPVANRFHLRLENNEEMGDEEVHTIPPELRILLDPGALPALQNPPIRGGEGQNGGLPFPFPDISRRVWNEEGEDGLPRPKDPVIPSIQLFPGLREPEEVQGSVDIALSVKCDNEKMIVAVEKDSFQASGYSGMDVTLLDPTCKAKMNGTHFVLESPLNGCGTRPRWSALDGVVYYNSIVIQVPALGDSSGWPDGYEDLESGDNGFPGDMDEGDASLFTRPEIVVFNCSLQQVRNPSSFQEQPHGNITFNMELYNTDLFLVPSQGVFSVPENGHVYVEVSVTKAEQELGFAIQTCFISPYSNPDRMSHYTIIENICPKDESVKFYSPKRVHFPIPQADMDKKRFSFVFKPVFNTSLLFLQCELTLCTKMEKHPQKLPKCVPPDEACTSLDASIIWAMMQNKKTFTKPLAVIHHEAESKEKGPSMKEPNPISPPIFHGLDTLTVMGIAFAAFVIGALLTGALWYIYSHTGETAGRQQVPTSPPASENSSAAHSIGSTQSTPCSSSSTA

SEQ ID NO: 6405 - protein, 481 aa, synthetic construct
  VARIANT 330: note = Residue may be deleted
ASTKGPSVFPLAPSSKSTSGGTAALGCLVKDYFPEPVTVSWNSGALTSGVHTFPAVLQSSGLYSLSSVVTVPSSSLGTQTYICNVNHKPSNTKVDKRVEPKSCDKTHTCPPCPAPELLGGPSVFLFPPKPKDTLMISRTPEVTCVVVDVSHEDPEVKFNWYVDGVEVHNAKTKPREEQYNSTYRVVSVLTVLHQDWLNGKEYKCKVSNKALPAPIEKTISKAKGQPREPQVCTLPPSREEMTKNQVSLSCAVKGFYPSDIAVEWESNGQPENNYKTTPPVLDSDGSFFLVSKLTVDKSRWQQGNVFSCSVMHEALHNHYTQKSLSLSPGKGGGGSGGGGSGGGGSIPPHVQKSVNNDMIVTDNNGAVKFPQLCKFCDVRFSTCDNQKSCMSNCSITSICEKPQEVCVAVWRKNDENITLETVCHDPKLPYHDFILEDAASPKCIMKEKKKPGETFFMCSCSSDECNDNIIFSEEYNTSNPD

SEQ ID NO: 6406 - protein, 481 aa, synthetic construct
  VARIANT 330: note = Residue may be deleted
ASTKGPSVFPLAPSSKSTSGGTAALGCLVKDYFPEPVTVSWNSGALTSGVHTFPAVLQSSGLYSLSSVVTVPSSSLGTQTYICNVNHKPSNTKVDKRVEPKSCDKTHTCPPCPAPELLGGPSVFLFPPKPKDTLMISRTPEVTCVVVDVSHEDPEVKFNWYVDGVEVHNAKTKPREEQYNSTYRVVSVLTVLHQDWLNGKEYKCKVSNKALPAPIEKTISKAKGQPREPQVYTLPPCREEMTKNQVSLWCLVKGFYPSDIAVEWESNGQPENNYKTTPPVLDSDGSFFLYSKLTVDKSRWQQGNVFSCSVMHEALHNHYTQKSLSLSPGKGGGGSGGGGSGGGGSIPPHVQKSVNNDMIVTDNNGAVKFPQLCKFCDVRFSTCDNQKSCMSNCSITSICEKPQEVCVAVWRKNDENITLETVCHDPKLPYHDFILEDAASPKCIMKEKKKPGETFFMCSCSSDECNDNIIFSEEYNTSNPD

SEQ ID NO: 6407 - protein, 378 aa, synthetic construct
  VARIANT 227: note = Residue may be deleted
DKTHTCPPCPAPELLGGPSVFLFPPKPKDTLMISRTPEVTCVVVDVSHEDPEVKFNWYVDGVEVHNAKTKPREEQYNSTYRVVSVLTVLHQDWLNGKEYKCKVSNKALPAPIEKTISKAKGQPREPQVCTLPPSREEMTKNQVSLSCAVKGFYPSDIAVEWESNGQPENNYKTTPPVLDSDGSFFLVSKLTVDKSRWQQGNVFSCSVMHEALHNHYTQKSLSLSPGKGGGGSGGGGSGGGGSIPPHVQKSVNNDMIVTDNNGAVKFPQLCKFCDVRFSTCDNQKSCMSNCSITSICEKPQEVCVAVWRKNDENITLETVCHDPKLPYHDFILEDAASPKCIMKEKKKPGETFFMCSCSSDECNDNIIFSEEYNTSNPD

SEQ ID NO: 6408 - protein, 378 aa, synthetic construct
  VARIANT 227: note = Residue may be deleted
DKTHTCPPCPAPELLGGPSVFLFPPKPKDTLMISRTPEVTCVVVDVSHEDPEVKFNWYVDGVEVHNAKTKPREEQYNSTYRVVSVLTVLHQDWLNGKEYKCKVSNKALPAPIEKTISKAKGQPREPQVYTLPPCREEMTKNQVSLWCLVKGFYPSDIAVEWESNGQPENNYKTTPPVLDSDGSFFLYSKLTVDKSRWQQGNVFSCSVMHEALHNHYTQKSLSLSPGKGGGGSGGGGSGGGGSIPPHVQKSVNNDMIVTDNNGAVKFPQLCKFCDVRFSTCDNQKSCMSNCSITSICEKPQEVCVAVWRKNDENITLETVCHDPKLPYHDFILEDAASPKCIMKEKKKPGETFFMCSCSSDECNDNIIFSEEYNTSNPD

SEQ ID NO: 6409 - protein, 481 aa, synthetic construct
  VARIANT 481: note = Residue may be deleted
IPPHVQKSVNNDMIVTDNNGAVKFPQLCKFCDVRFSTCDNQKSCMSNCSITSICEKPQEVCVAVWRKNDENITLETVCHDPKLPYHDFILEDAASPKCIMKEKKKPGETFFMCSCSSDECNDNIIFSEEYNTSNPDGGGGSGGGGSGGGGSASTKGPSVFPLAPSSKSTSGGTAALGCLVKDYFPEPVTVSWNSGALTSGVHTFPAVLQSSGLYSLSSVVTVPSSSLGTQTYICNVNHKPSNTKVDKRVEPKSCDKTHTCPPCPAPELLGGPSVFLFPPKPKDTLMISRTPEVTCVVVDVSHEDPEVKFNWYVDGVEVHNAKTKPREEQYNSTYRVVSVLTVLHQDWLNGKEYKCKVSNKALPAPIEKTISKAKGQPREPQVCTLPPSREEMTKNQVSLSCAVKGFYPSDIAVEWESNGQPENNYKTTPPVLDSDGSFFLVSKLTVDKSRWQQGNVFSCSVMHEALHNHYTQKSLSLSPGK

SEQ ID NO: 6410 - protein, 481 aa, synthetic construct
  VARIANT 481: note = Residue may be deleted
IPPHVQKSVNNDMIVTDNNGAVKFPQLCKFCDVRFSTCDNQKSCMSNCSITSICEKPQEVCVAVWRKNDENITLETVCHDPKLPYHDFILEDAASPKCIMKEKKKPGETFFMCSCSSDECNDNIIFSEEYNTSNPDGGGGSGGGGSGGGGSASTKGPSVFPLAPSSKSTSGGTAALGCLVKDYFPEPVTVSWNSGALTSGVHTFPAVLQSSGLYSLSSVVTVPSSSLGTQTYICNVNHKPSNTKVDKRVEPKSCDKTHTCPPCPAPELLGGPSVFLFPPKPKDTLMISRTPEVTCVVVDVSHEDPEVKFNWYVDGVEVHNAKTKPREEQYNSTYRVVSVLTVLHQDWLNGKEYKCKVSNKALPAPIEKTISKAKGQPREPQVYTLPPCREEMTKNQVSLWCLVKGFYPSDIAVEWESNGQPENNYKTTPPVLDSDGSFFLYSKLTVDKSRWQQGNVFSCSVMHEALHNHYTQKSLSLSPGK

SEQ ID NO: 6411 - protein, 257 aa, synthetic construct
IPPHVQKSVNNDMIVTDNNGAVKFPQLCKFCDVRFSTCDNQKSCMSNCSITSICEKPQEVCVAVWRKNDENITLETVCHDPKLPYHDFILEDAASPKCIMKEKKKPGETFFMCSCSSDECNDNIIFSEEYNTSNPDGGGGSGGGGSGGGGSGQPKANPTVTLFPPSSEELQANKATLVCLISDFYPGAVTVAWKADGSPVKAGVETTKPSKQSNNKYAASSYLSLTPEQWKSHRSYSCQVTHEGSTVEKTVAPTECS

SEQ ID NO: 6412 - protein, 258 aa, synthetic construct
IPPHVQKSVNNDMIVTDNNGAVKFPQLCKFCDVRFSTCDNQKSCMSNCSITSICEKPQEVCVAVWRKNDENITLETVCHDPKLPYHDFILEDAASPKCIMKEKKKPGETFFMCSCSSDECNDNIIFSEEYNTSNPDGGGGSGGGGSGGGGSRTVAAPSVFIFPPSDEQLKSGTASVVCLLNNFYPREAKVQWKVDNALQSGNSQESVTEQDSKDSTYSLSSTLTLSKADYEKHKVYACEVTHQGLSSPVTKSFNRGEC

SEQ ID NO: 6413 - protein, 7 aa, synthetic construct
AEAAAKA

SEQ ID NO: 6414-7291 - skipped (878 entries)

SEQ ID NO: 7292 - protein, 32 aa, synthetic construct
GIPDQFSGSNSGNIATLTISKAQAGYEADYYC

SEQ ID NO: 7293 - protein, 10 aa, synthetic construct
QSWDSTNSAV

SEQ ID NO: 7294 - protein, 107 aa, synthetic construct
SYTLTQPPLLSVALGHKATITCSGERLSDKYVHWYQQKPGRAPVMVIYENDKRPSGIPDQFSGSNSGNIATLTISKAQAGYEADYYCQSWDSTNSAVFGSGTQLTVL

SEQ ID NO: 7295 - protein, 118 aa, synthetic construct
QIQLQESGPGLVKPSQSLSLSCSVTGFSINTGGYHWNWIRQFPGKKVEWMGYIYSSGTTKYNPSLKSRISITRDTSKNQFFLQLNSVTTEDTATYYCARGDWHYFDYWGQGTMVAVSS

SEQ ID NO: 7296 - protein, 107 aa, synthetic construct
SYTLTQPPLVSVALGQKATIICSGENLSDKYVHWYQQKPGRAPVMVIYENDKRPSGIPDQFSGSNSGNIATLTISKAQAGYEADYYCHCWDSTNSAVFGSGTHLTVL

SEQ ID NO: 7297 - protein, 118 aa, synthetic construct
QIQLQESGPGLVKPSQSLSLTCSVTGFSINTGGYHWNWIRQFPGKKLEWMGYIYSSGSTRYNPSLKSRFSITRDTSKNQFFLQLNSVTTEDTATYYCTRGNWHYFDYWGQGTLVAVSS

SEQ ID NO: 7298 - protein, 118 aa, synthetic construct
QIQLQESGPGLVKPSQSLSLSCSVTGFSITTTGYHWNWIRQFPGKKLEWMGYIYSSGSTSYNPSLKSRFSITRDTSKNQFFLQLNSVTTEDTATYYCARGDWHYFDYWGPGTMVTVSS

SEQ ID NO: 7299 - protein, 107 aa, synthetic construct
SFTLTQPPLVSVAVGQVATITCSGEKLSDKYVHWYQQKPGRAPVMVIYENDRRPSGIPDQFSGSNSGNIASLTISKAQAGDEADYFCQFWDSTNSAVFGGGTQLTVL

SEQ ID NO: 7300 - protein, 118 aa, synthetic construct
QIQLQESGPGLVKPSQTLSLTCTVSGFSITTTGYHWNWIRQHPGKGLEWIGYIYSSGSTSYNPSLKSLVTISRDTSKNQFSLKLSSVTAADTAVYYCARGDWHYFDYWGQGTMVTVSS

SEQ ID NO: 7301 - protein, 118 aa, synthetic construct
QIQLVESGGGLVKPGGSLRLSCAVSGFSITTTGYHWNWIRQAPGKGLEWVGYIYSSGSTSYNPSLKSRFTISRDTAKNSFYLQMNSLRAEDTAVYYCARGDWHYFDYWGQGTMVTVSS

SEQ ID NO: 7302 - protein, 118 aa, synthetic construct
EIQLLESGGGLVQPGGSLRLSCAVSGFSITTTGYHWNWVRQAPGKGLEWVGYIYSSGSTSYNPSLKSRFTISRDTSKNTFYLQMNSLRAEDTAVYYCARGDWHYFDYWGQGTMVTVSS

SEQ ID NO: 7303 - protein, 118 aa, synthetic construct
EIQLVESGGGLVQPGGSLRLSCAVSGFSITTTGYHWNWVRQAPGKGLEWVGYIYSSGSTSYNPSLKSRFTISRDTAKNSFYLQMNSLRAEDTAVYYCARGDWHYFDYWGQGTMVTVSS

SEQ ID NO: 7304 - protein, 118 aa, synthetic construct
QIQLVQSGAEVKKPGASVKVSCKVSGFSITTTGYHWNWVRQAPGQGLEWMGYIYSSGSTSYNPSLKSRVTMTRDTSTNTFYMELSSLRSEDTAVYYCARGDWHYFDYWGQGTMVTVSS

SEQ ID NO: 7305 - protein, 107 aa, synthetic construct
SSETTQPPSVSVSPGQTASITCSGEKLSDKYVHWYQQKPGQSPVMVIYENDRRPSGIPERFSGSNSGNTATLTISGTQAMDEADYFCQFWDSTNSAVFGGGTQLTVL

SEQ ID NO: 7306 - protein, 107 aa, synthetic construct
SSETTQPHSVSVATAQMARITCSGEKLSDKYVHWYQQKPGQDPVMVIYENDRRPSGIPERFSGSNPGNTATLTISRIEAGDEADYFCQFWDSTNSAVFGGGTQLTVL

SEQ ID NO: 7307 - protein, 107 aa, synthetic construct
QSVTTQPPSASGTPGQRVTISCSGEKLSDKYVHWYQQLPGTAPKMLIYENDRRPSGVPDRFSGSNSGNSASLAISGLRSEDEADYFCQFWDSTNSAVFGGGTQLTVL

SEQ ID NO: 7308 - protein, 107 aa, synthetic construct
QSVTTQPPSVSGAPGQRVTISCSGEKLSDKYVHWYQQLPGTAPKMLIYENDRRPSGVPDRFSGSNSGNSASLAITGLQAEDEADYFCQFWDSTNSAVFGGGTQLTVL

SEQ ID NO: 7309 - protein, 108 aa, synthetic construct
DSVTTQSPLSLPVTLGQPASISCSGEKLSDKYVHWYQQRPGQSPRMLIYENDRRPSGVPDRFSGSNSGNDATLKISRVEAEDVGVYFCQFWDSTNSAVFGGGTKVEIK

SEQ ID NO: 7310 - protein, 245 aa, synthetic construct
EIQLLESGGGLVQPGGSLRLSCAVSGFSITTTGYHWNWVRQAPGKGLEWVGYIYSSGSTSYNPSLKSRFTISRDTSKNTFYLQMNSLRAEDTAVYYCARGDWHYFDYWGQGTMVTVSSGGGGSGGGGSGGGGSGGGGSSSETTQPPSVSVSPGQTASITCSGEKLSDKYVHWYQQKPGQSPVMVIYENDRRPSGIPERFSGSNSGNTATLTISGTQAMDEADYFCQFWDSTNSAVFGGGTQLTVL

SEQ ID NO: 7311 - protein, 246 aa, synthetic construct
EIQLLESGGGLVQPGGSLRLSCAVSGFSITTTGYHWNWVRQAPGKGLEWVGYIYSSGSTSYNPSLKSRFTISRDTSKNTFYLQMNSLRAEDTAVYYCARGDWHYFDYWGQGTMVTVSSGGGGSGGGGSGGGGSGGGGSDSVTTQSPLSLPVTLGQPASISCSGEKLSDKYVHWYQQRPGQSPRMLIYENDRRPSGVPDRFSGSNSGNDATLKISRVEAEDVGVYFCQFWDSTNSAVFGGGTKVEIK

SEQ ID NO: 7312 - protein, 32 aa, synthetic construct
QIQLQESGPGLVKPSQSLSLSCSVTGFSINTG

SEQ ID NO: 7313 - protein, 5 aa, synthetic construct
GYHWN

SEQ ID NO: 7314 - protein, 14 aa, synthetic construct
WIRQFPGKKVEWMG

SEQ ID NO: 7315 - protein, 8 aa, synthetic construct
GDWHYFDY

SEQ ID NO: 7316 - protein, 11 aa, synthetic construct
WGQGTMVAVSS

SEQ ID NO: 7317 - protein, 32 aa, synthetic construct
QIQLQESGPGLVKPSQSLSLTCSVTGFSINTG

SEQ ID NO: 7318 - protein, 16 aa, synthetic construct
YIYSSGSTRYNPSLKS

SEQ ID NO: 7319 - protein, 32 aa, synthetic construct
RFSITRDTSKNQFFLQLNSVTTEDTATYYCTR

SEQ ID NO: 7320 - protein, 22 aa, synthetic construct
SYTLTQPPLVSVALGQKATIIC

SEQ ID NO: 7321 - protein, 10 aa, synthetic construct
HCWDSTNSAV

SEQ ID NO: 7322 - protein, 32 aa, synthetic construct
QIQLQESGPGLVKPSQSLSLSCSVTGFSITTT

SEQ ID NO: 7323 - protein, 32 aa, synthetic construct
RFSITRDTSKNQFFLQLNSVTTEDTATYYCAR

SEQ ID NO: 7324 - protein, 11 aa, synthetic construct
WGPGTMVTVSS

SEQ ID NO: 7325 - protein, 22 aa, synthetic construct
SFTLTQPPLVSVAVGQVATITC

SEQ ID NO: 7326 - protein, 11 aa, synthetic construct
SGEKLSDKYVH

SEQ ID NO: 7327 - protein, 7 aa, synthetic construct
ENDRRPS

SEQ ID NO: 7328 - protein, 32 aa, synthetic construct
GIPDQFSGSNSGNIASLTISKAQAGDEADYFC

SEQ ID NO: 7329 - protein, 10 aa, synthetic construct
QFWDSTNSAV

SEQ ID NO: 7330 - protein, 32 aa, synthetic construct
QIQLQESGPGLVKPSQTLSLTCTVSGFSITTT

SEQ ID NO: 7331 - protein, 32 aa, synthetic construct
QIQLVESGGGLVKPGGSLRLSCAVSGFSITTT

SEQ ID NO: 7332 - protein, 32 aa, synthetic construct
EIQLLESGGGLVQPGGSLRLSCAVSGFSITTT

SEQ ID NO: 7333 - protein, 32 aa, synthetic construct
EIQLVESGGGLVQPGGSLRLSCAVSGFSITTT

SEQ ID NO: 7334 - protein, 32 aa, synthetic construct
QIQLVQSGAEVKKPGASVKVSCKVSGFSITTT

SEQ ID NO: 7335 - protein, 22 aa, synthetic construct
SSETTQPPSVSVSPGQTASITC

SEQ ID NO: 7336 - protein, 32 aa, synthetic construct
GIPERFSGSNSGNTATLTISGTQAMDEADYFC

SEQ ID NO: 7337 - protein, 32 aa, synthetic construct
GIPERFSGSNPGNTATLTISRIEAGDEADYFC

SEQ ID NO: 7338 - protein, 32 aa, synthetic construct
GVPDRFSGSNSGNSASLAISGLRSEDEADYFC

SEQ ID NO: 7339 - protein, 32 aa, synthetic construct
GVPDRFSGSNSGNSASLAITGLQAEDEADYFC

SEQ ID NO: 7340 - protein, 23 aa, synthetic construct
DSVTTQSPLSLPVTLGQPASISC

SEQ ID NO: 7341 - protein, 15 aa, synthetic construct
WYQQRPGQSPRMLIY

SEQ ID NO: 7342 - protein, 32 aa, synthetic construct
GVPDRFSGSNSGNDATLKISRVEAEDVGVYFC

SEQ ID NO: 7343-7370 - skipped (28 entries)

SEQ ID NO: 7371 - protein, 32 aa, synthetic construct
QIQLQESGPGLVKPSETLSLTCTVSGFSINTG

SEQ ID NO: 7372 - protein, 32 aa, synthetic construct
QIQLQESGPGLVKPSQTLSLTCTVSGFSINTG

SEQ ID NO: 7373 - protein, 32 aa, synthetic construct
EIQLLESGGGLVQPGGSLRLSCAVSGFSINTG

SEQ ID NO: 7374 - protein, 32 aa, synthetic construct
QIQLVQSGAEVKKPGSSVKVSCKVSGFSINTG

SEQ ID NO: 7375 - protein, 32 aa, synthetic construct
EIQLVESGGGLVQPGGSLRLSCAVSGFSINTG

SEQ ID NO: 7376 - protein, 32 aa, synthetic construct
QIQLVQSGAEVKKPGASVKVSCKVSGFSINTG

SEQ ID NO: 7377 - protein, 32 aa, synthetic construct
QIQLVESGGGLVKPGGSLRLSCAVSGFSINTG

SEQ ID NO: 7378 - protein, 32 aa, synthetic construct
EIQLVQSGAEVKKPGATVKISCKVSGFSINTG

SEQ ID NO: 7379-7384 - skipped (6 entries)

SEQ ID NO: 7385 - protein, 16 aa, synthetic construct
YIYSSGTTKYNPSLKS

SEQ ID NO: 7386 - protein, 23 aa, synthetic construct
EIVLTQSPASKAASQGEEVTITC

SEQ ID NO: 7387 - protein, 12 aa, synthetic construct
STSSSVTTNYLH

SEQ ID NO: 7388 - protein, 15 aa, synthetic construct
WYQQKPDTPPKLLIY

SEQ ID NO: 7389 - protein, 7 aa, synthetic construct
STSNLAS

SEQ ID NO: 7390 - protein, 118 aa, synthetic construct
EIQLLESGGGLVQPGGSLRLSCAVSGFSITTTGYHWNWVRQAPGKGLEWVGYIYSSGSTSYAPSLKSRFTISRDTSKNTFYLQMNSLRAEDTAVYYCARGDWHYFDYWGQGTMVTVSS

SEQ ID NO: 7391 - protein, 32 aa, synthetic construct
GVPTRFSGSGSGTSYSLTISNMQGEDVATYYC

SEQ ID NO: 7392 - protein, 9 aa, synthetic construct
QQCLSSPCT

SEQ ID NO: 7393 - protein, 10 aa, synthetic construct
FGAGTKLEIK

SEQ ID NO: 7394 - protein, 28 aa, synthetic construct
EVQLVEKGGGLVQPGKSLKLSCTASGFT

SEQ ID NO: 7395 - protein, 108 aa, synthetic construct
DSVTTQSPLSLPVTLGQPASISCSGEKLSDKYVHWYQQRPGQSPRMLIYENDRRPSGVPDRFSGSNSGNDATLKISRVEAEDVGVYFCQFWDSTASAVFGGGTKVEIK

SEQ ID NO: 7396 - protein, 7 aa, synthetic construct
FSEYWMN

SEQ ID NO: 7397 - protein, 108 aa, synthetic construct
DSVTTQSPLSLPVTLGQPASISCSGEKLSDKYVHWYQQRPGQSPRMLIYENDRRPSGVPDRFSGSNSGNDATLKISRVEAEDVGVYFCQFWASTNSAVFGGGTKVEIK

SEQ ID NO: 7398 - protein, 14 aa, synthetic construct
WLRQAPGKGLEWVG

SEQ ID NO: 7399 - protein, 107 aa, synthetic construct
SSETTQPPSVSVSPGQTASITCSGEKLSDKYVHWYQQKPGQSPVMVIYENDRRPSGIPERFSGSNSGNTATLTISGTQAMDEADYFCQFWASTNSAVFGGGTQLTVL

SEQ ID NO: 7400 - protein, 19 aa, synthetic construct
VIKYKYSNYATEFAESVKG

SEQ ID NO: 7401 - protein, 107 aa, synthetic construct
SSETTQPPSVSVSPGQTASITCSGEKLSDKYVHWYQQKPGQSPVMVIYENDRRPSGIPERFSGSNSGNTATLTISGTQAMDEADYFCQFWDSTASAVFGGGTQLTVL

SEQ ID NO: 7402 - protein, 32 aa, synthetic construct
RFTISRDDSKSSVYLQMTNLRAEDTAIYYCAR

SEQ ID NO: 7403 - protein, 7 aa, synthetic construct
GRDVQDY

SEQ ID NO: 7404 - protein, 108 aa, synthetic construct
DSVTTQSPLSLPVTLGQPASISCSGEKLSDKYVHWYQQRPGQSPRMLIYENDRRPSGVPDRFSGSNSGNDATLKISRVEAEDVGVYFCQFWASTASAVFGGGTKVEIK

SEQ ID NO: 7405 - protein, 107 aa, synthetic construct
SSETTQPPSVSVSPGQTASITCSGEKLSDKYVHWYQQKPGQSPVMVIYENDRRPSGIPERFSGSNSGNTATLTISGTQAMDEADYFCQFWASTASAVFGGGTQLTVL

SEQ ID NO: 7406 - protein, 246 aa, synthetic construct
EIQLLESGGGLVQPGGSLRLSCAVSGFSITTTGYHWNWVRQAPGKGLEWVGYIYSSGSTSYNPSLKSRFTISRDTSKNTFYLQMNSLRAEDTAVYYCARGDWHYFDYWGQGTMVTVSSGGGGSGGGGSGGGGSGGGGSDSVTTQSPLSLPVTLGQPASISCSGEKLSDKYVHWYQQRPGQSPRMLIYENDRRPSGVPDRFSGSNSGNDATLKISRVEAEDVGVYFCQFWDSTASAVFGGGTKVEIK

SEQ ID NO: 7407 - protein, 246 aa, synthetic construct
EIQLLESGGGLVQPGGSLRLSCAVSGFSITTTGYHWNWVRQAPGKGLEWVGYIYSSGSTSYNPSLKSRFTISRDTSKNTFYLQMNSLRAEDTAVYYCARGDWHYFDYWGQGTMVTVSSGGGGSGGGGSGGGGSGGGGSDSVTTQSPLSLPVTLGQPASISCSGEKLSDKYVHWYQQRPGQSPRMLIYENDRRPSGVPDRFSGSNSGNDATLKISRVEAEDVGVYFCQFWASTNSAVFGGGTKVEIK

SEQ ID NO: 7408 - protein, 245 aa, synthetic construct
EIQLLESGGGLVQPGGSLRLSCAVSGFSITTTGYHWNWVRQAPGKGLEWVGYIYSSGSTSYNPSLKSRFTISRDTSKNTFYLQMNSLRAEDTAVYYCARGDWHYFDYWGQGTMVTVSSGGGGSGGGGSGGGGSGGGGSSSETTQPPSVSVSPGQTASITCSGEKLSDKYVHWYQQKPGQSPVMVIYENDRRPSGIPERFSGSNSGNTATLTISGTQAMDEADYFCQFWASTNSAVFGGGTQLTVL

SEQ ID NO: 7409 - protein, 245 aa, synthetic construct
EIQLLESGGGLVQPGGSLRLSCAVSGFSITTTGYHWNWVRQAPGKGLEWVGYIYSSGSTSYNPSLKSRFTISRDTSKNTFYLQMNSLRAEDTAVYYCARGDWHYFDYWGQGTMVTVSSGGGGSGGGGSGGGGSGGGGSSSETTQPPSVSVSPGQTASITCSGEKLSDKYVHWYQQKPGQSPVMVIYENDRRPSGIPERFSGSNSGNTATLTISGTQAMDEADYFCQFWDSTASAVFGGGTQLTVL

SEQ ID NO: 7410 - protein, 9 aa, synthetic construct
QQSLSSPST

SEQ ID NO: 7411 - protein, 246 aa, synthetic construct
EIQLLESGGGLVQPGGSLRLSCAVSGFSITTTGYHWNWVRQAPGKGLEWVGYIYSSGSTSYAPSLKSRFTISRDTSKNTFYLQMNSLRAEDTAVYYCARGDWHYFDYWGQGTMVTVSSGGGGSGGGGSGGGGSGGGGSDSVTTQSPLSLPVTLGQPASISCSGEKLSDKYVHWYQQRPGQSPRMLIYENDRRPSGVPDRFSGSNSGNDATLKISRVEAEDVGVYFCQFWDSTNSAVFGGGTKVEIK

SEQ ID NO: 7412 - protein, 245 aa, synthetic construct
EIQLLESGGGLVQPGGSLRLSCAVSGFSITTTGYHWNWVRQAPGKGLEWVGYIYSSGSTSYAPSLKSRFTISRDTSKNTFYLQMNSLRAEDTAVYYCARGDWHYFDYWGQGTMVTVSSGGGGSGGGGSGGGGSGGGGSSSETTQPPSVSVSPGQTASITCSGEKLSDKYVHWYQQKPGQSPVMVIYENDRRPSGIPERFSGSNSGNTATLTISGTQAMDEADYFCQFWDSTNSAVFGGGTQLTVL

SEQ ID NO: 7413 - protein, 246 aa, synthetic construct
EIQLLESGGGLVQPGGSLRLSCAVSGFSITTTGYHWNWVRQAPGKGLEWVGYIYSSGSTSYAPSLKSRFTISRDTSKNTFYLQMNSLRAEDTAVYYCARGDWHYFDYWGQGTMVTVSSGGGGSGGGGSGGGGSGGGGSDSVTTQSPLSLPVTLGQPASISCSGEKLSDKYVHWYQQRPGQSPRMLIYENDRRPSGVPDRFSGSNSGNDATLKISRVEAEDVGVYFCQFWASTASAVFGGGTKVEIK

SEQ ID NO: 7414 - protein, 245 aa, synthetic construct
EIQLLESGGGLVQPGGSLRLSCAVSGFSITTTGYHWNWVRQAPGKGLEWVGYIYSSGSTSYAPSLKSRFTISRDTSKNTFYLQMNSLRAEDTAVYYCARGDWHYFDYWGQGTMVTVSSGGGGSGGGGSGGGGSGGGGSSSETTQPPSVSVSPGQTASITCSGEKLSDKYVHWYQQKPGQSPVMVIYENDRRPSGIPERFSGSNSGNTATLTISGTQAMDEADYFCQFWASTASAVFGGGTQLTVL

SEQ ID NO: 7415 - protein, 9 aa, synthetic construct
QQSLSSPCT

SEQ ID NO: 7416 - protein, 10 aa, synthetic construct
QFWDSTASAV

SEQ ID NO: 7417 - protein, 9 aa, synthetic construct
QQCLSSPST

SEQ ID NO: 7418 - protein, 118 aa, synthetic construct
EVQLVEKGGGLVQPGKSLKLSCTASGFTFSEYWMNWLRQAPGKGLEWVGVIKYKYSNYATEFAESVKGRFTISRDDSKSSVYLQMTNLRAEDTAIYYCARGRDVQDYWGQGTMVTVSS

SEQ ID NO: 7419 - protein, 108 aa, synthetic construct
EIVLTQSPASKAASQGEEVTITCSTSSSVTTNYLHWYQQKPDTPPKLLIYSTSNLASGVPTRFSGSGSGTSYSLTISNMQGEDVATYYCQQCLSSPCTFGAGTKLEIK

SEQ ID NO: 7420 - protein, 108 aa, synthetic construct
EIVLTQSPASKAASQGEEVTITCSTSSSVTTNYLHWYQQKPDTPPKLLIYSTSNLASGVPTRFSGSGSGTSYSLTISNMQGEDVATYYCQQSLSSPSTFGAGTKLEIK

SEQ ID NO: 7421 - protein, 108 aa, synthetic construct
EIVLTQSPASKAASQGEEVTITCSTSSSVTTNYLHWYQQKPDTPPKLLIYSTSNLASGVPTRFSGSGSGTSYSLTISNMQGEDVATYYCQQSLSSPCTFGAGTKLEIK

SEQ ID NO: 7422 - protein, 108 aa, synthetic construct
EIVLTQSPASKAASQGEEVTITCSTSSSVTTNYLHWYQQKPDTPPKLLIYSTSNLASGVPTRFSGSGSGTSYSLTISNMQGEDVATYYCQQCLSSPSTFGAGTKLEIK

SEQ ID NO: 7423 - protein, 28 aa, synthetic construct
EVQLVESGGGLVQPGPSLRLSCTASGFT

SEQ ID NO: 7424 - protein, 32 aa, synthetic construct
RFTISRDDSKSIVYLQMNSLKTEDTAVYYCAR

SEQ ID NO: 7425 - protein, 118 aa, synthetic construct
EVQLVESGGGLVQPGPSLRLSCTASGFTFSEYWMNWLRQAPGKGLEWVGVIKYKYSNYATEFAESVKGRFTISRDDSKSIVYLQMNSLKTEDTAVYYCARGRDVQDYWGQGTMVTVSS

SEQ ID NO: 7426 - protein, 23 aa, synthetic construct
DIQLTQSPSFLSASVGDRVTITC

SEQ ID NO: 7427 - protein, 32 aa, synthetic construct
GVPSRFSGSGSGTEYTLTISSLQPEDFATYYC

SEQ ID NO: 7428 - protein, 108 aa, synthetic construct
DIQLTQSPSFLSASVGDRVTITCSTSSSVTTNYLHWYQQKPGKAPKLLIYSTSNLASGVPSRFSGSGSGTEYTLTISSLQPEDFATYYCQQCLSSPCTFGQGTKLEIK

SEQ ID NO: 7429 - protein, 23 aa, synthetic construct
DIVLTQSPDSLAVSLGERATINC

SEQ ID NO: 7430 - protein, 15 aa, synthetic construct
WYQQKPGQPPKLLIY

SEQ ID NO: 7431 - protein, 32 aa, synthetic construct
GVPDRFSGSGSGTDYTLTISSLQAEDVAVYYC

SEQ ID NO: 7432 - protein, 108 aa, synthetic construct
DIVLTQSPDSLAVSLGERATINCSTSSSVTTNYLHWYQQKPGQPPKLLIYSTSNLASGVPDRFSGSGSGTDYTLTISSLQAEDVAVYYCQQCLSSPCTFGQGTKLEIK

SEQ ID NO: 7433 - protein, 15 aa, synthetic construct
WYQQKPGQAPKLLIY

SEQ ID NO: 7434 - protein, 32 aa, synthetic construct
GIPDRFSGSGSGTDYTLTISRLEPEDFAVYYC

SEQ ID NO: 7435 - protein, 108 aa, synthetic construct
EIVLTQSPATLSLSPGERATLSCSTSSSVTTNYLHWYQQKPGQAPKLLIYSTSNLASGIPDRFSGSGSGTDYTLTISRLEPEDFAVYYCQQCLSSPCTFGQGTKLEIK

SEQ ID NO: 7436 - protein, 28 aa, synthetic construct
EVQLVESGGGLVQPGRSLRLSCTASGFT

SEQ ID NO: 7437 - protein, 16 aa, synthetic construct
YIYSSGSTSYAPSLKS

SEQ ID NO: 7438 - protein, 118 aa, synthetic construct
EVQLVESGGGLVQPGRSLRLSCTASGFTFSEYWMNWLRQAPGKGLEWVGVIKYKYSNYATEFAESVKGRFTISRDDSKSIVYLQMNSLKTEDTAVYYCARGRDVQDYWGQGTMVTVSS

SEQ ID NO: 7439 - protein, 32 aa, synthetic construct
GIPARFSGSGSGTDYTLTISSLQPEDFAVYYC

SEQ ID NO: 7440 - protein, 108 aa, synthetic construct
EIVLTQSPATLSLSPGERATLSCSTSSSVTTNYLHWYQQKPGQAPKLLIYSTSNLASGIPARFSGSGSGTDYTLTISSLQPEDFAVYYCQQCLSSPCTFGQGTKLEIK

SEQ ID NO: 7441 - protein, 108 aa, synthetic construct
DIQLTQSPSFLSASVGDRVTITCSTSSSVTTNYLHWYQQKPGKAPKLLIYSTSNLASGVPSRFSGSGSGTEYTLTISSLQPEDFATYYCQQSLSSPSTFGQGTKLEIK

SEQ ID NO: 7442 - protein, 108 aa, synthetic construct
EIVLTQSPATLSLSPGERATLSCSTSSSVTTNYLHWYQQKPGQAPKLLIYSTSNLASGIPARFSGSGSGTDYTLTISSLQPEDFAVYYCQQSLSSPSTFGQGTKLEIK

SEQ ID NO: 7443 - protein, 29 aa, synthetic construct
EVQLVESGGGLVQPGGSLRLSCAASGFTF

SEQ ID NO: 7444 - protein, 6 aa, synthetic construct
SEYWMN

SEQ ID NO: 7445 - protein, 32 aa, synthetic construct
RFTISRDDSKSSVYLQMNSLKTEDTAVYYCAR

SEQ ID NO: 7446 - protein, 118 aa, synthetic construct
EVQLVESGGGLVQPGGSLRLSCAASGFTFSEYWMNWLRQAPGKGLEWVGVIKYKYSNYATEFAESVKGRFTISRDDSKSSVYLQMNSLKTEDTAVYYCARGRDVQDYWGQGTMVTVSS

SEQ ID NO: 7447 - protein, 10 aa, synthetic construct
QFWASTASAV

SEQ ID NO: 7448 - protein, 330 aa, Mus musculus
AKTTAPSVYPLAPVCGDTTGSSVTLGCLVKGYFPEPVTLTWNSGSLSSGVHTFPAVLQSDLYTLSSSVTVTSSTWPSQSITCNVAHPASSTKVDKKIEPRGPTIKPCPPCKCPAPNLLGGPSVFIFPPKIKDVLMISLSPIVTCVVVDVSEDDPDVQISWFVNNVEVHTAQTQTHREDYNSTLRVVSALPIQHQDWMSGKEFKCKVNNKDLPAPIERTISKPKGSVRAPQVYVLPPPEEEMTKKQVTLTCMVTDFMPEDIYVEWTNNGKTELNYKNTEPVLDSDGSYFMYSKLRVEKKNWVERNSYSCSVVHEGLHNHHTTKSFSRTPGK

SEQ ID NO: 7449 - protein, 330 aa, synthetic construct
AKTTAPSVYPLAPVCGDTTGSSVTLGCLVKGYFPEPVTLTWNSGSLSSGVHTFPAVLQSDLYTLSSSVTVTSSTWPSQSITCNVAHPASSTKVDKKIEPRGPTIKPCPPCKCPAPNAAGGPSVFIFPPKIKDVLMISLSPIVTCVVVDVSEDDPDVQISWFVNNVEVHTAQTQTHREDYNSTLRVVSALPIQHQDWMSGKEFKCKVNNKDLGAPIERTISKPKGSVRAPQVYVLPPPEEEMTKKQVTLTCMVTDFMPEDIYVEWTNNGKTELNYKNTEPVLDSDGSYFMYSKLRVEKKNWVERNSYSCSVVHEGLHNHHTTKSFSRTPGK

SEQ ID NO: 7450 - protein, 330 aa, synthetic construct
AKTTAPSVYPLAPVCGDTTGSSVTLGCLVKGYFPEPVTLTWNSGSLSSGVHTFPAVLQSDLYTLSSSVTVTSSTWPSQSITCNVAHPASSTKVDKKIEPRGPTIKPCPPCKCPAPNAAGGPSVFIFPPKIKDVLMISLSPIVTCVVVDVSEDDPDVQISWFVNNVEVHTAQTQTHREDYNSTLRVVSALPIQHQDWMSGKEFKCKVNNKDLGAPIERTISKPKGSVRAPQVYVLPPCEEEMTKKQVTLWCMVTDFMPEDIYVEWTNNGKTELNYKNTEPVLDSDGSYFMYSKLRVEKKNWVERNSYSCSVVHEGLHNHHTTKSFSRTPGK

SEQ ID NO: 7451 - protein, 107 aa, synthetic construct
RADAAPTVSIFPPSSEQLTSGGASVVCFLNNFYPKDINVKWKIDGSERQNGVLNSWTDQDSKDSTYSMSSTLTLTKDEYERHNSYTCEATHKTSTSPIVKSFNRNEC

SEQ ID NO: 7452 - protein, 476 aa, synthetic construct
EVQLVESGGGLVQPGKSLKLSCEASGFTFSGYGMHWVRQAPGRGLESVAYITSSSINIKYADAVKGRFTVSRDNAKNLLFLQMNILKSEDTAMYYCARFDWDKNYWGQGTMVTVSSGGGGSGGGGSGGGGSGGGGSDIQMTQSPSSLPASLGDRVTINCQASQDISNYLNWYQQKPGKAPKLLIYYTNKLADGVPSRFSGSGSGRDSSFTISSLESEDIGSYYCQQYYNYPWTFGPGTKLEIKGGGGSTIKPCPPCKCPAPNAAGGPSVFIFPPKIKDVLMISLSPIVTCVVVDVSEDDPDVQISWFVNNVEVHTAQTQTHREDYNSTLRVVSALPIQHQDWMSGKEFKCKVNNKDLGAPIERTISKPKGSVRAPQVCVLPPPEEEMTKKQVTLSCAVTDFMPEDIYVEWTNNGKTELNYKNTEPVLDSDGSYFMVSKLRVEKKNWVERNSYSCSVVHEGLHNHHTTKSFSRTPGK

SEQ ID NO: 7453 - protein, 330 aa, synthetic construct
ASTKGPSVFPLAPSSKSTSGGTAALGCLVKDYFPEPVTVSWNSGALTSGVHTFPAVLQSSGLYSLSSVVTVPSSSLGTQTYICNVNHKPSNTKVDKKVEPKSCDKTHTCPPCPAPELLGGPSVFLFPPKPKDTLMISRTPEVTCVVVDVSHEDPEVKFNWYVDGVEVHNAKTKPREEQYGSTYRVVSVLTVLHQDWLNGKEYKCKVSNKALPAPIEKTISKAKGQPREPQVYTLPPSREEMTKNQVSLTCLVKGFYPSDIAVEWESNGQPENNYKTTPPVLDSDGSFFLYSKLTVDKSRWQQGNVFSCSVMHEALHNHYTQKSLSLSPGK

SEQ ID NO: 7454 - protein, 107 aa, synthetic construct [sequence omitted]

SEQ ID NO: 7455 - protein, 28 aa, synthetic construct
QVQLQQPGTELVKPGASVKLSCKASGYT

SEQ ID NO: 7456 - protein, 7 aa, synthetic construct
FTTYWMH

SEQ ID NO: 7457 - protein, 14 aa, synthetic construct
WVKQRPGHGLEWIG

SEQ ID NO: 7458 - protein, 17 aa, synthetic construct
NFNPNNGDTNYNEKFKT

SEQ ID NO: 7459 - protein, 32 aa, synthetic construct
KATLTVDKSSSTAYMQLSSLTSEDSAVYYCAR

SEQ ID NO: 7460 - protein, 10 aa, synthetic construct
DDYGRYYFDY

SEQ ID NO: 7461 - protein, 11 aa, synthetic construct
WGQGTTLTVSS

SEQ ID NO: 7462 - protein, 23 aa, synthetic construct
DIVMSQSPSSLAVSAGEKVTMSC

SEQ ID NO: 7463 - protein, 17 aa, synthetic construct
KSSQSLLNSRTRKNYLA

SEQ ID NO: 7464 - protein, 7 aa, synthetic construct
WAFTRES

SEQ ID NO: 7465 - protein, 32 aa, synthetic construct
GVPDRFTGSGSGTDFTLTISSVQAEDLAIYYC

SEQ ID NO: 7466 - protein, 8 aa, synthetic construct
KQSFILRT

SEQ ID NO: 7467 - protein, 28 aa, synthetic construct
QVQLVQSGAEVKKPGASVKVSCKASGYT

SEQ ID NO: 7468 - protein, 32 aa, synthetic construct
RVTMTVDKSTSTAYMELRSLRSDDMAVYYCAR

SEQ ID NO: 7469 - protein, 32 aa, synthetic construct
GVPSRFSGSGSGTEFTLTISSLQPDDFATYYC

SEQ ID NO: 7470 - protein, 23 aa, synthetic construct
EIVMTQSPATLSLSPGERATLSC

SEQ ID NO: 7471 - protein, 15 aa, synthetic construct
WYQQKPGLAPRLLIY

SEQ ID NO: 7472 - protein, 32 aa, synthetic construct
GIPDRFSGSGSGTDFTLTISRLEPEDFAVYYC

SEQ ID NO: 7473 - protein, 14 aa, synthetic construct
WVRQAPGKGLEWMG

SEQ ID NO: 7474 - protein, 32 aa, synthetic construct
RVTMTVDKSTSTAYMELSSLRSEDTAVYYCAR

SEQ ID NO: 7475 - protein, 23 aa, synthetic construct
DIQMTQSPSSLSASVGDRVTITC

SEQ ID NO: 7476 - protein, 32 aa, synthetic construct
GVPSRFSGSGSGTDFTLTISSLQPEDFATYYC

SEQ ID NO: 7477 - protein, 119 aa, synthetic construct
QVQLQQPGTELVKPGASVKLSCKASGYTFTTYWMHWVKQRPGHGLEWIGNFNPNNGDTNYNEKFKTKATLTVDKSSSTAYMQLSSLTSEDSAVYYCARDDYGRYYFDYWGQGTTLTVSS

SEQ ID NO: 7478 - protein, 119 aa, synthetic construct
QVQLVQSGAEVKKPGASVKVSCKASGYTFTTYWMHWVRQAPGQGLEWMGNFNPNNGDTNYNEKFKTRVTMTVDKSTSTAYMELRSLRSDDMAVYYCARDDYGRYYFDYWGQGTLVTVSS

SEQ ID NO: 7479 - protein, 119 aa, synthetic construct
QVQLVQSGAEVKKPGASVKVSCKASGYTFTTYWMHWVRQAPGKGLEWMGNFNPNNGDTNYNEKFKTRVTMTVDKSTSTAYMELSSLRSEDTAVYYCARDDYGRYYFDYWGQGTLVTVSS

SEQ ID NO: 7480 - protein, 112 aa, synthetic construct
DIVMSQSPSSLAVSAGEKVTMSCKSSQSLLNSRTRKNYLAWYQQKPGQAPKLLIYWAFTRESGVPDRFTGSGSGTDFTLTISSVQAEDLAIYYCKQSFILRTFGGGTKLEIK

SEQ ID NO: 7481 - protein, 112 aa, synthetic construct
DIQMTQSPSTLSASVGDRVTITCKSSQSLLNSRTRKNYLAWYQQKPGKAPKLLIYWAFTRESGVPSRFSGSGSGTEFTLTISSLQPDDFATYYCKQSFILRTFGGGTKVEIK

SEQ ID NO: 7482 - protein, 112 aa, synthetic construct
EIVMTQSPATLSLSPGERATLSCKSSQSLLNSRTRKNYLAWYQQKPGLAPRLLIYWAFTRESGIPDRFSGSGSGTDFTLTISRLEPEDFAVYYCKQSFILRTFGGGTKVEIK

SEQ ID NO: 7483 - protein, 112 aa, synthetic construct
DIQMTQSPSSLSASVGDRVTITCKSSQSLLNSRTRKNYLAWYQQKPGKAPKLLIYWAFTRESGVPSRFSGSGSGTDFTLTISSLQPEDFATYYCKQSFILRTFGGGTKVEIK

SEQ ID NO: 7484 - protein, 448 aa, synthetic construct
EVQLVESGGGLVQPGGSLRLSCAASGFTFSEYWMNWLRQAPGKGLEWVGVIKYKYSNYATEFAESVKGRFTISRDDSKSSVYLQMNSLKTEDTAVYYCARGRDVQDYWGQGTMVTVSSASTKGPSVFPLAPSSKSTSGGTAALGCLVKDYFPEPVTVSWNSGALTSGVHTFPAVLQSSGLYSLSSVVTVPSSSLGTQTYICNVNHKPSNTKVDKRVEPKSCDKTHTCPPCPAPELLGGPSVFLFPPKPKDTLMISRTPEVTCVVVDVSHEDPEVKFNWYVDGVEVHNAKTKPREEQYASTYRVVSVLTVLHQDWLNGKEYKCKVSNKALPAPIEKTISKAKGQPREPQVYTLPPCREEMTKNQVSLWCLVKGFYPSDIAVEWESNGQPENNYKTTPPVLDSDGSFFLYSKLTVDKSRWQQGNVFSCSVMHEALHNHYTQKSLSLSPGK

SEQ ID NO: 7485 - protein, 215 aa, synthetic construct
DIQLTQSPSFLSASVGDRVTITCSTSSSVTTNYLHWYQQKPGKAPKLLIYSTSNLASGVPSRFSGSGSGTEYTLTISSLQPEDFATYYCQQCLSSPCTFGQGTKLEIKRTVAAPSVFIFPPSDEQLKSGTASVVCLLNNFYPREAKVQWKVDNALQSGNSQESVTEQDSKDSTYSLSSTLTLSKADYEKHKVYACEVTHQGLSSPVTKSFNRGEC

SEQ ID NO: 7486 - protein, 478 aa, synthetic construct
QVQLVQSGAEVKKPGASVKVSCKASGYTFTTYWMHWVRQAPGQGLEWMGNFNPNNGDTNYNEKFKTRVTMTVDKSTSTAYMELRSLRSDDMAVYYCARDDYGRYYFDYWGQGTLVTVSSGGGGSGGGGSGGGGSGGGGSDIQMTQSPSTLSASVGDRVTITCKSSQSLLNSRTRKNYLAWYQQKPGKAPKLLIYWAFTRESGVPSRFSGSGSGTEFTLTISSLQPDDFATYYCKQSFILRTFGGGTKVEIKDKTHTCPPCPAPELLGGPSVFLFPPKPKDTLMISRTPEVTCVVVDVSHEDPEVKFNWYVDGVEVHNAKTKPREEQYASTYRVVSVLTVLHQDWLNGKEYKCKVSNKALPAPIEKTISKAKGQPREPQVCTLPPSREEMTKNQVSLSCAVKGFYPSDIAVEWESNGQPENNYKTTPPVLDSDGSFFLVSKLTVDKSRWQQGNVFSCSVMHEALHNHYTQKSLSLSPGK

SEQ ID NO: 7487 - protein, 28 aa, synthetic construct
QDGNEEMGGITQTPYKVSISGTTVILTC

SEQ ID NO: 7488 - protein, 120 aa, synthetic construct
QVQLKESGPGLVAPSQSLSITCTVSGFSLTAYGVNWVRQPPGKGLEWLGMIWGDGNTDYNSALKSRLSISKDNSKSQVFLKMNSLQTDDTARYYCARDRVTATLYAMDYWGQGTSVTVSS

SEQ ID NO: 7489 - protein, 15 aa, synthetic construct
RASKSVSILGTHLIH

SEQ ID NO: 7490 - protein, 111 aa, synthetic construct
DIVLTQSPASLAVSLGQRATISCRASESVDSYGNSFMHWYQQKPGQPPKLLIYRASNLESGIPARFSGSGSRTDFTLTINPVEADDVATYYCQQSNEDPYTFGGGTKLEIK

SEQ ID NO: 7491 - protein, 106 aa, synthetic construct
EIVLTQSPAITAASLGQKVTITCSASSSVSYMHWYQQKSGTSPKPWIYEISKLASGVPARFSGSGSGTSYSLTISSMEAEDAAIYYCQQWNYPLLTFGAGTKLELK

SEQ ID NO: 7492 - protein, 243 aa, synthetic construct
EVQLVESGGGLVQPGGSLRLSCAASGFTFSNFGMHWVRQAPGKGLEWVSYISSGSSTIYYADTLKGRFTISRDNSKNTLYLQMNSLRAEDTAVYYCARRGEGAMDYWGQGTTVTVSSGGGGSGGGGSGGGGSGGGGSDNQLTQSPSFLSASVGDRVTITCRASSSVNYIYWYQQKPGKAPKLLIYYTSNLAPGVPSRFSGSGSGNEYTLTISSLQPEDFATYYCQQFTSSPFTFGQGTKLEIK

SEQ ID NO: 7493 - protein, 23 aa, synthetic construct
DSVTTQSPLSLPVTLGQPASISC

SEQ ID NO: 7494 - protein, 11 aa, synthetic construct
SGEKLSDKYVH

SEQ ID NO: 7495 - protein, 15 aa, synthetic construct
WYQQRPGQSPRMLIY

SEQ ID NO: 7496 - protein, 7 aa, synthetic construct
ENDRRPS

SEQ ID NO: 7497 - protein, 28 aa, synthetic construct
EIQLLESGGGLVQPGGSLRLSCAVSGFS

SEQ ID NO: 7498 - protein, 9 aa, synthetic construct
ITTTGYHWN

SEQ ID NO: 7499 - protein, 246 aa, synthetic construct
EVQLVESGGGLVQPGRSLRLSCTASGFTFSEYWMNWLRQAPGKGLEWVGVIKYKYSNYATEFAESVKGRFTISRDDSKSIVYLQMNSLKTEDTAVYYCARGRDVQDYWGQGTMVTVSSGGGGSGGGGSGGGGSGGGGSDIQLTQSPSFLSASVGDRVTITCSTSSSVTTNYLHWYQQKPGKAPKLLIYSTSNLASGVPSRFSGSGSGTEYTLTISSLQPEDFATYYCQQCLSSPCTFGQGTKLEIK

SEQ ID NO: 7500 - protein, 246 aa, synthetic construct
EVQLVESGGGLVQPGRSLRLSCTASGFTFSEYWMNWLRQAPGKGLEWVGVIKYKYSNYATEFAESVKGRFTISRDDSKSIVYLQMNSLKTEDTAVYYCARGRDVQDYWGQGTMVTVSSGGGGSGGGGSGGGGSGGGGSEIVLTQSPATLSLSPGERATLSCSTSSSVTTNYLHWYQQKPGQAPKLLIYSTSNLASGIPARFSGSGSGTDYTLTISSLQPEDFAVYYCQQCLSSPCTFGQGTKLEIK

SEQ ID NO: 7501 - protein, 246 aa, synthetic construct
EVQLVESGGGLVQPGRSLRLSCTASGFTFSEYWMNWLRQAPGKGLEWVGVIKYKYSNYATEFAESVKGRFTISRDDSKSIVYLQMNSLKTEDTAVYYCARGRDVQDYWGQGTMVTVSSGGGGSGGGGSGGGGSGGGGSDIQLTQSPSFLSASVGDRVTITCSTSSSVTTNYLHWYQQKPGKAPKLLIYSTSNLASGVPSRFSGSGSGTEYTLTISSLQPEDFATYYCQQSLSSPSTFGQGTKLEIK

SEQ ID NO: 7502 - protein, 246 aa, synthetic construct
EVQLVESGGGLVQPGRSLRLSCTASGFTFSEYWMNWLRQAPGKGLEWVGVIKYKYSNYATEFAESVKGRFTISRDDSKSIVYLQMNSLKTEDTAVYYCARGRDVQDYWGQGTMVTVSSGGGGSGGGGSGGGGSGGGGSEIVLTQSPATLSLSPGERATLSCSTSSSVTTNYLHWYQQKPGQAPKLLIYSTSNLASGIPARFSGSGSGTDYTLTISSLQPEDFAVYYCQQSLSSPSTFGQGTKLEIK

SEQ ID NO: 7503 - protein, 246 aa, synthetic construct
EVQLVESGGGLVQPGGSLRLSCAASGFTFSEYWMNWLRQAPGKGLEWVGVIKYKYSNYATEFAESVKGRFTISRDDSKSSVYLQMNSLKTEDTAVYYCARGRDVQDYWGQGTMVTVSSGGGGSGGGGSGGGGSGGGGSDIQLTQSPSFLSASVGDRVTITCSTSSSVTTNYLHWYQQKPGKAPKLLIYSTSNLASGVPSRFSGSGSGTEYTLTISSLQPEDFATYYCQQCLSSPCTFGQGTKLEIK

SEQ ID NO: 7504 - protein, 246 aa, synthetic construct
EVQLVESGGGLVQPGGSLRLSCAASGFTFSEYWMNWLRQAPGKGLEWVGVIKYKYSNYATEFAESVKGRFTISRDDSKSSVYLQMNSLKTEDTAVYYCARGRDVQDYWGQGTMVTVSSGGGGSGGGGSGGGGSGGGGSEIVLTQSPATLSLSPGERATLSCSTSSSVTTNYLHWYQQKPGQAPKLLIYSTSNLASGIPARFSGSGSGTDYTLTISSLQPEDFAVYYCQQCLSSPCTFGQGTKLEIK

SEQ ID NO: 7505 - protein, 246 aa, synthetic construct
EVQLVESGGGLVQPGGSLRLSCAASGFTFSEYWMNWLRQAPGKGLEWVGVIKYKYSNYATEFAESVKGRFTISRDDSKSSVYLQMNSLKTEDTAVYYCARGRDVQDYWGQGTMVTVSSGGGGSGGGGSGGGGSGGGGSDIQLTQSPSFLSASVGDRVTITCSTSSSVTTNYLHWYQQKPGKAPKLLIYSTSNLASGVPSRFSGSGSGTEYTLTISSLQPEDFATYYCQQSLSSPSTFGQGTKLEIK

SEQ ID NO: 7506 - protein, 246 aa, synthetic construct
EVQLVESGGGLVQPGGSLRLSCAASGFTFSEYWMNWLRQAPGKGLEWVGVIKYKYSNYATEFAESVKGRFTISRDDSKSSVYLQMNSLKTEDTAVYYCARGRDVQDYWGQGTMVTVSSGGGGSGGGGSGGGGSGGGGSEIVLTQSPATLSLSPGERATLSCSTSSSVTTNYLHWYQQKPGQAPKLLIYSTSNLASGIPARFSGSGSGTDYTLTISSLQPEDFAVYYCQQSLSSPSTFGQGTKLEIK
